United States Patent Application Publication US 2016/0024575 A1 - sequence listing, part 2

SEQ ID NO: 20991 - DNA, 35 bp, Artificial Sequence
  synthetic circulating small noncoding RNA (sncRNA) 5' transfer RNA (tRNA) half
caggagatcctgggttcgaatcccagtggggcctg

SEQ ID NO: 20992 - DNA, 20 bp, Artificial Sequence
  synthetic circulating small noncoding RNA (sncRNA) 5' transfer RNA (tRNA) half
cttatccattaggccacgcg

SEQ ID NO: 20993 - DNA, 34 bp, Artificial Sequence
  synthetic circulating small noncoding RNA (sncRNA) 5' transfer RNA (tRNA) half
cgcgggaggcccgggttcggttcccggccaatgc

SEQ ID NO: 20994 - DNA, 46 bp, Artificial Sequence
  synthetic circulating small noncoding RNA (sncRNA) 5' transfer RNA (tRNA) half
cctcacacgcgaaaggtccccggttcgaaaccgggcggaaacagca

SEQ ID NO: 20995 - DNA, 13 bp, Artificial Sequence
  synthetic circulating small noncoding RNA (sncRNA) 5' transfer RNA (tRNA) half
gagagcgccgaat

SEQ ID NO: 20996 - DNA, 22 bp, Artificial Sequence
  synthetic circulating small noncoding RNA (sncRNA) 5' transfer RNA (tRNA) half
ataacccagaggtcgatggatc

SEQ ID NO: 20997 - DNA, 32 bp, Artificial Sequence
  synthetic circulating small noncoding RNA (sncRNA) 5' transfer RNA (tRNA) half
cgtgtgaggcgaacgtgataaccactacacta

SEQ ID NO: 20998 - DNA, 38 bp, Artificial Sequence
  synthetic circulating small noncoding RNA (sncRNA) 5' transfer RNA (tRNA) half
ttccgagccagccaggagtcgaacctggaatcttctga

SEQ ID NO: 20999 - DNA, 40 bp, Artificial Sequence
  synthetic circulating small noncoding RNA (sncRNA) 5' transfer RNA (tRNA) half
gcctccccgtcggggaatcgaaccccggtctcccgcgtga

SEQ ID NO: 21000 - DNA, 8 bp, Artificial Sequence
  synthetic circulating small noncoding RNA (sncRNA) 5' transfer RNA (tRNA) half
cgccggga

SEQ ID NO: 21001 - DNA, 18 bp, Artificial Sequence
  synthetic circulating small noncoding RNA (sncRNA) 5' transfer RNA (tRNA) half
cccaacgtggggctcgaa

SEQ ID NO: 21002 - DNA, 26 bp, Artificial Sequence
  synthetic circulating small noncoding RNA (sncRNA) 5' transfer RNA (tRNA) half
gtgccgagactcggattcgaaccgag

SEQ ID NO: 21003 - DNA, 9 bp, Artificial Sequence
  synthetic circulating small noncoding RNA (sncRNA) 5' transfer RNA (tRNA) half
tccgcccgg

SEQ ID NO: 21004 - DNA, 34 bp, Artificial Sequence
  synthetic circulating small noncoding RNA (sncRNA) 5' transfer RNA (tRNA) half
gtgccccgtgtgaggatcgaactcacgaccttca

SEQ ID NO: 21005 - DNA, 9 bp, Artificial Sequence
  synthetic circulating small noncoding RNA (sncRNA) 5' transfer RNA (tRNA) half
agcacccgg

SEQ ID NO: 21006 - DNA, 28 bp, Artificial Sequence
  synthetic circulating small noncoding RNA (sncRNA) 5' transfer RNA (tRNA) half
cctccccgtcggggaatcgaaccccggt

SEQ ID NO: 21007 - DNA, 20 bp, Artificial Sequence
  synthetic circulating small noncoding RNA (sncRNA) 5' transfer RNA (tRNA) half
cgatccccgtacgggccaca

SEQ ID NO: 21008 - DNA, 22 bp, Artificial Sequence
  synthetic circulating small noncoding RNA (sncRNA) 5' transfer RNA (tRNA) half
gaacctgcgcggggaaacccca

SEQ ID NO: 21009 - DNA, 37 bp, Artificial Sequence
  synthetic circulating small noncoding RNA (sncRNA) 5' transfer RNA (tRNA) half
gcacgaggccctgggttcgatccccagcacctccatt

SEQ ID NO: 21010 - DNA, 19 bp, Artificial Sequence
  synthetic circulating small noncoding RNA (sncRNA) 5' transfer RNA (tRNA) half
tgaccccgacgtgacttga

SEQ ID NO: 21011 - DNA, 40 bp, Artificial Sequence
  synthetic circulating small noncoding RNA (sncRNA) 5' transfer RNA (tRNA) half
acgagctggccggttagctcagttggttagagcgtggtgc

SEQ ID NO: 21012 - DNA, 8 bp, Artificial Sequence
  synthetic circulating small noncoding RNA (sncRNA) 5' transfer RNA (tRNA) half
cgatcccg

SEQ ID NO: 21013 - DNA, 34 bp, Artificial Sequence
  synthetic circulating small noncoding RNA (sncRNA) 5' transfer RNA (tRNA) half
tgccctctctgaggttcgaactcaggaccttcag

SEQ ID NO: 21014 - DNA, 23 bp, Artificial Sequence
  synthetic circulating small noncoding RNA (sncRNA) 5' transfer RNA (tRNA) half
tttcgatccatcgacctctgggt

SEQ ID NO: 21015 - DNA, 28 bp, Artificial Sequence
  synthetic circulating small noncoding RNA (sncRNA) 5' transfer RNA (tRNA) half
ttggtagttcaatggtagaattctcgcc

SEQ ID NO: 21016 - DNA, 22 bp, Artificial Sequence
  synthetic circulating small noncoding RNA (sncRNA) 5' transfer RNA (tRNA) half
gacctgtacggggaacgaaccc

SEQ ID NO: 21017 - DNA, 30 bp, Artificial Sequence
  synthetic circulating small noncoding RNA (sncRNA) 5' transfer RNA (tRNA) half
ttccgtagtgtagtggttagcgcgttcgcc

SEQ ID NO: 21018 - DNA, 32 bp, Artificial Sequence
  synthetic circulating small noncoding RNA (sncRNA) 5' transfer RNA (tRNA) half
caatgcagagtactaaccactatacgatctcg

SEQ ID NO: 21019 - DNA, 14 bp, Artificial Sequence
  synthetic circulating small noncoding RNA (sncRNA) 5' transfer RNA (tRNA) half
gcgaccttggcgtt

SEQ ID NO: 21020 - DNA, 35 bp, Artificial Sequence
  synthetic circulating small noncoding RNA (sncRNA) 5' transfer RNA (tRNA) half
ggcccgtacggggatcgaacccgcgaccttggcgt

SEQ ID NO: 21021 - DNA, 13 bp, Artificial Sequence
  synthetic circulating small noncoding RNA (sncRNA) 5' transfer RNA (tRNA) half
tgagattaagagt

SEQ ID NO: 21022 - DNA, 43 bp, Artificial Sequence
  synthetic circulating small noncoding RNA (sncRNA) 5' transfer RNA (tRNA) half
aactcggatcgctggattcaaagtccagagtgctaaccattac

SEQ ID NO: 21023 - DNA, 7 bp, Artificial Sequence
  synthetic circulating small noncoding RNA (sncRNA) 5' transfer RNA (tRNA) half
gcccggc

SEQ ID NO: 21024 - DNA, 23 bp, Artificial Sequence
  synthetic circulating small noncoding RNA (sncRNA) 5' transfer RNA (tRNA) half
taggggtatgattctcgcttagg

SEQ ID NO: 21025 - DNA, 20 bp, Artificial Sequence
  synthetic circulating small noncoding RNA (sncRNA) 5' transfer RNA (tRNA) half
ttgccgaaacccgggatcga

SEQ ID NO: 21026 - DNA, 10 bp, Artificial Sequence
  synthetic circulating small noncoding RNA (sncRNA) 5' transfer RNA (tRNA) half
gcgactctgg

SEQ ID NO: 21027 - DNA, 29 bp, Artificial Sequence
  synthetic circulating small noncoding RNA (sncRNA) 5' transfer RNA (tRNA) half
aggatggccgagcggtctaaggcgctgcg

SEQ ID NO: 21028 - DNA, 13 bp, Artificial Sequence
  synthetic circulating small noncoding RNA (sncRNA) 5' transfer RNA (tRNA) half
actcgcgacccct

SEQ ID NO: 21029 - DNA, 34 bp, Artificial Sequence
  synthetic circulating small noncoding RNA (sncRNA) 5' transfer RNA (tRNA) half
cccaggcggcccgggttcgactcccggtgtggga

SEQ ID NO: 21030 - DNA, 21 bp, Artificial Sequence
  synthetic circulating small noncoding RNA (sncRNA) 5' transfer RNA (tRNA) half
cgtgacaggcggggatactaa

SEQ ID NO: 21031 - DNA, 17 bp, Artificial Sequence
  synthetic circulating small noncoding RNA (sncRNA) 5' transfer RNA (tRNA) half
atggccgagtggttaag

SEQ ID NO: 21032 - DNA, 20 bp, Artificial Sequence
  synthetic circulating small noncoding RNA (sncRNA) 5' transfer RNA (tRNA) half
gtcgatgaggatgggattcg

SEQ ID NO: 21033 - DNA, 23 bp, Artificial Sequence
  synthetic circulating small noncoding RNA (sncRNA) 5' transfer RNA (tRNA) half
cgtcacgaacaggattcgaacct

SEQ ID NO: 21034 - DNA, 13 bp, Artificial Sequence
  synthetic circulating small noncoding RNA (sncRNA) 5' transfer RNA (tRNA) half
cgctagaccatgt

SEQ ID NO: 21035 - DNA, 19 bp, Artificial Sequence
  synthetic circulating small noncoding RNA (sncRNA) 5' transfer RNA (tRNA) half
tagctcagctggtagagcg

SEQ ID NO: 21036 - DNA, 14 bp, Artificial Sequence
  synthetic circulating small noncoding RNA (sncRNA) 5' transfer RNA (tRNA) half
cggtagagcatgag

SEQ ID NO: 21037 - DNA, 23 bp, Artificial Sequence
  synthetic circulating small noncoding RNA (sncRNA) 5' transfer RNA (tRNA) half
ctctacccctgagctataccccc

SEQ ID NO: 21038 - DNA, 16 bp, Artificial Sequence
  synthetic circulating small noncoding RNA (sncRNA) 5' transfer RNA (tRNA) half
agcgaccacgaaggga

SEQ ID NO: 21039 - DNA, 37 bp, Artificial Sequence
  synthetic circulating small noncoding RNA (sncRNA) 5' transfer RNA (tRNA) half
ggccgcggcggtgagagcgccgaatcctaaccactag

SEQ ID NO: 21040 - DNA, 13 bp, Artificial Sequence
  synthetic circulating small noncoding RNA (sncRNA) 5' transfer RNA (tRNA) half
acccacaatccct

SEQ ID NO: 21041 - DNA, 16 bp, Artificial Sequence
  synthetic circulating small noncoding RNA (sncRNA) 5' transfer RNA (tRNA) half
ccgtccgtgcctgccc

SEQ ID NO: 21042 - DNA, 26 bp, Artificial Sequence
  synthetic circulating small noncoding RNA (sncRNA) 5' transfer RNA (tRNA) half
cgggttcgaaccccgtccgtgcctgc

SEQ ID NO: 21043 - DNA, 39 bp, Artificial Sequence
  synthetic circulating small noncoding RNA (sncRNA) 5' transfer RNA (tRNA) half
aacccgggccgcggcggtgagagcgccgaatcctaacca

SEQ ID NO: 21044 - DNA, 20 bp, Artificial Sequence
  synthetic circulating small noncoding RNA (sncRNA) 5' transfer RNA (tRNA) half
cgcagcgagcagggttcgaa

SEQ ID NO: 21045 - DNA, 41 bp, Artificial Sequence
  synthetic circulating small noncoding RNA (sncRNA) 5' transfer RNA (tRNA) half
tgcgttggccgggaatcgaacccgggtcaactgcttggaag

SEQ ID NO: 21046 - DNA, 14 bp, Artificial Sequence
  synthetic circulating small noncoding RNA (sncRNA) 5' transfer RNA (tRNA) half
aaggcgccagactc

SEQ ID NO: 21047 - DNA, 6 bp, Artificial Sequence
  synthetic circulating small noncoding RNA (sncRNA) 5' transfer RNA (tRNA) half
cgcctg

SEQ ID NO: 21048 - DNA, 20 bp, Artificial Sequence
  synthetic circulating small noncoding RNA (sncRNA) 5' transfer RNA (tRNA) half
cagctggcccgtacggggat

SEQ ID NO: 21049 - DNA, 32 bp, Artificial Sequence
  synthetic circulating small noncoding RNA (sncRNA) 5' transfer RNA (tRNA) half
aggcggggatactaaccactatactaacgagg

SEQ ID NO: 21050 - DNA, 26 bp, Artificial Sequence
  synthetic circulating small noncoding RNA (sncRNA) 5' transfer RNA (tRNA) half
tgggattaagagtcccatgctctacc

SEQ ID NO: 21051 - DNA, 15 bp, Artificial Sequence
  synthetic circulating small noncoding RNA (sncRNA) 5' transfer RNA (tRNA) half
gaccagtgctctaac

SEQ ID NO: 21052 - DNA, 15 bp, Artificial Sequence
  synthetic circulating small noncoding RNA (sncRNA) 5' transfer RNA (tRNA) half
tggtctagtggtatg

SEQ ID NO: 21053 - DNA, 23 bp, Artificial Sequence
  synthetic circulating small noncoding RNA (sncRNA) 5' transfer RNA (tRNA) half
gctcagttggtagagcggaggac

SEQ ID NO: 21054 - DNA, 12 bp, Artificial Sequence
  synthetic circulating small noncoding RNA (sncRNA) 5' transfer RNA (tRNA) half
cgggccgcctgg

SEQ ID NO: 21055 - DNA, 34 bp, Artificial Sequence
  synthetic circulating small noncoding RNA (sncRNA) 5' transfer RNA (tRNA) half
ttaagagtctcatgctctaccgactgagctagcc

SEQ ID NO: 21056 - DNA, 14 bp, Artificial Sequence
  synthetic circulating small noncoding RNA (sncRNA) 5' transfer RNA (tRNA) half
agtactctgcgttg

SEQ ID NO: 21057 - DNA, 23 bp, Artificial Sequence
  synthetic circulating small noncoding RNA (sncRNA) 5' transfer RNA (tRNA) half
ttttaatctgagggtccagggtt

SEQ ID NO: 21058 - DNA, 25 bp, Artificial Sequence
  synthetic circulating small noncoding RNA (sncRNA) 5' transfer RNA (tRNA) half
gtctgatgctctaccaactgagcta

SEQ ID NO: 21059 - DNA, 39 bp, Artificial Sequence
  synthetic circulating small noncoding RNA (sncRNA) 5' transfer RNA (tRNA) half
gagtccagagtgctaaccattacaccatggaaccccctc

SEQ ID NO: 21060 - DNA, 19 bp, Artificial Sequence
  synthetic circulating small noncoding RNA (sncRNA) 5' transfer RNA (tRNA) half
ggttcgactcccggtatgg

SEQ ID NO: 21061 - DNA, 10 bp, Artificial Sequence
  synthetic circulating small noncoding RNA (sncRNA) 5' transfer RNA (tRNA) half
gagttcaaat

SEQ ID NO: 21062 - DNA, 7 bp, Artificial Sequence
  synthetic circulating small noncoding RNA (sncRNA) 5' transfer RNA (tRNA) half
atcgaac

SEQ ID NO: 21063 - DNA, 30 bp, Artificial Sequence
  synthetic circulating small noncoding RNA (sncRNA) 5' transfer RNA (tRNA) half
gtccatcgccttaaccactcggccacgact

SEQ ID NO: 21064 - DNA, 36 bp, Artificial Sequence
  synthetic circulating small noncoding RNA (sncRNA) 5' transfer RNA (tRNA) half
gcggttatcacgtctgctttacacgcagaaggtcct

SEQ ID NO: 21065 - DNA, 12 bp, Artificial Sequence
  synthetic circulating small noncoding RNA (sncRNA) 5' transfer RNA (tRNA) half
tcgaaccaggga

SEQ ID NO: 21066 - DNA, 25 bp, Artificial Sequence
  synthetic circulating small noncoding RNA (sncRNA) 5' transfer RNA (tRNA) half
cctgggttcgaatcccagcggggcc

SEQ ID NO: 21067 - DNA, 27 bp, Artificial Sequence
  synthetic circulating small noncoding RNA (sncRNA) 5' transfer RNA (tRNA) half
gttgtgggttcgagccccacattgggc

SEQ ID NO: 21068 - DNA, 12 bp, Artificial Sequence
  synthetic circulating small noncoding RNA (sncRNA) 5' transfer RNA (tRNA) half
ggagtcgaacct

SEQ ID NO: 21069 - DNA, 27 bp, Artificial Sequence
  synthetic circulating small noncoding RNA (sncRNA) 5' transfer RNA (tRNA) half
gccagccaggagtcgaacctggaatct

SEQ ID NO: 21070 - DNA, 21 bp, Artificial Sequence
  synthetic circulating small noncoding RNA (sncRNA) 5' transfer RNA (tRNA) half
aaaacttgggctcgtccggga

SEQ ID NO: 21071 - DNA, 29 bp, Artificial Sequence
  synthetic circulating small noncoding RNA (sncRNA) 5' transfer RNA (tRNA) half
tttgggctcgtccgggatttgaacccggg

SEQ ID NO: 21072 - DNA, 38 bp, Artificial Sequence
  synthetic circulating small noncoding RNA (sncRNA) 5' transfer RNA (tRNA) half
agaccagtgctctaacccctgagctatggagccctcac

SEQ ID NO: 21073 - DNA, 29 bp, Artificial Sequence
  synthetic circulating small noncoding RNA (sncRNA) 5' transfer RNA (tRNA) half
gaaggtcctgggttcgagccccagtggaa

SEQ ID NO: 21074 - DNA, 5 bp, Artificial Sequence
  synthetic circulating small noncoding RNA (sncRNA) 5' transfer RNA (tRNA) half
cccga

SEQ ID NO: 21075 - DNA, 35 bp, Artificial Sequence
  synthetic circulating small noncoding RNA (sncRNA) 5' transfer RNA (tRNA) half
gaggtcccaccgagatttgaactcggatcgctgga

SEQ ID NO: 21076 - DNA, 12 bp, Artificial Sequence
  synthetic circulating small noncoding RNA (sncRNA) 5' transfer RNA (tRNA) half
tcgcgggttcga

SEQ ID NO: 21077 - DNA, 16 bp, Artificial Sequence
  synthetic circulating small noncoding RNA (sncRNA) 5' transfer RNA (tRNA) half
agtgctaaccattaca

SEQ ID NO: 21078 - DNA, 28 bp, Artificial Sequence
  synthetic circulating small noncoding RNA (sncRNA) 5' transfer RNA (tRNA) half
gccgggaatcgaacccgggcctcccgcg

SEQ ID NO: 21079 - DNA, 38 bp, Artificial Sequence
  synthetic circulating small noncoding RNA (sncRNA) 5' transfer RNA (tRNA) half
cctccccgtcggggaattgaaccccggtctcccgcgtg

SEQ ID NO: 21080 - DNA, 20 bp, Artificial Sequence
  synthetic circulating small noncoding RNA (sncRNA) 5' transfer RNA (tRNA) half
ggaatcctaaccgctagacc

SEQ ID NO: 21081 - DNA, 36 bp, Artificial Sequence
  synthetic circulating small noncoding RNA (sncRNA) 5' transfer RNA (tRNA) half
agtctcatgctctaccgactgagctagccgggcgct

SEQ ID NO: 21082 - DNA, 18 bp, Artificial Sequence
  synthetic circulating small noncoding RNA (sncRNA) 5' transfer RNA (tRNA) half
agattctaggttcgactc

SEQ ID NO: 21083 - DNA, 13 bp, Artificial Sequence
  synthetic circulating small noncoding RNA (sncRNA) 5' transfer RNA (tRNA) half
gcgccacagagac

SEQ ID NO: 21084 - DNA, 20 bp, Artificial Sequence
  synthetic circulating small noncoding RNA (sncRNA) 5' transfer RNA (tRNA) half
tccccgtacgggccaaagct

SEQ ID NO: 21085 - DNA, 16 bp, Artificial Sequence
  synthetic circulating small noncoding RNA (sncRNA) 5' transfer RNA (tRNA) half
gaccgctcggccatcc

SEQ ID NO: 21086 - DNA, 34 bp, Artificial Sequence
  synthetic circulating small noncoding RNA (sncRNA) 5' transfer RNA (tRNA) half
aacccgggccgcggcggtgagagcgccgaatcct

SEQ ID NO: 21087 - DNA, 21 bp, Artificial Sequence
  synthetic circulating small noncoding RNA (sncRNA) 5' transfer RNA (tRNA) half
atcagacgccttatccattag

SEQ ID NO: 21088 - DNA, 27 bp, Artificial Sequence
  synthetic circulating small noncoding RNA (sncRNA) 5' transfer RNA (tRNA) half
aggtcccaccgagatttgaactcggat

SEQ ID NO: 21089 - DNA, 24 bp, Artificial Sequence
  synthetic circulating small noncoding RNA (sncRNA) 5' transfer RNA (tRNA) half
gaacctgtgcggggaaaccccatt

SEQ ID NO: 21090 - DNA, 16 bp, Artificial Sequence
  synthetic circulating small noncoding RNA (sncRNA) 5' transfer RNA (tRNA) half
attcccgggcggcgca

SEQ ID NO: 21091 - DNA, 26 bp, Artificial Sequence
  synthetic circulating small noncoding RNA (sncRNA) 5' transfer RNA (tRNA) half
tctgaatccagcgatccgagttcaaa

SEQ ID NO: 21092 - DNA, 16 bp, Artificial Sequence
  synthetic circulating small noncoding RNA (sncRNA) 5' transfer RNA (tRNA) half
gttcaaatccgggtgc

SEQ ID NO: 21093 - DNA, 14 bp, Artificial Sequence
  synthetic circulating small noncoding RNA (sncRNA) 5' transfer RNA (tRNA) half
caaggtcgcgggtt

SEQ ID NO: 21094 - DNA, 17 bp, Artificial Sequence
  synthetic circulating small noncoding RNA (sncRNA) 5' transfer RNA (tRNA) half
cgaacctggaatcttct

SEQ ID NO: 21095 - DNA, 11 bp, Artificial Sequence
  synthetic circulating small noncoding RNA (sncRNA) 5' transfer RNA (tRNA) half
cgcctaacacg

SEQ ID NO: 21096 - DNA, 37 bp, Artificial Sequence
  synthetic circulating small noncoding RNA (sncRNA) 5' transfer RNA (tRNA) half
accgacgaggatgggattcgaacccacgcgtgcaaag

SEQ ID NO: 21097 - DNA, 19 bp, Artificial Sequence
  synthetic circulating small noncoding RNA (sncRNA) 5' transfer RNA (tRNA) half
cggccatcctgactacatt

SEQ ID NO: 21098 - DNA, 16 bp, Artificial Sequence
  synthetic circulating small noncoding RNA (sncRNA) 5' transfer RNA (tRNA) half
cgctagaccatgtggg

SEQ ID NO: 21099 - DNA, 18 bp, Artificial Sequence
  synthetic circulating small noncoding RNA (sncRNA) 5' transfer RNA (tRNA) half
cgactcccggtatgggaa

SEQ ID NO: 21100 - DNA, 18 bp, Artificial Sequence
  synthetic circulating small noncoding RNA (sncRNA) 5' transfer RNA (tRNA) half
tcatgaccccgacgtgat

SEQ ID NO: 21101 - DNA, 23 bp, Artificial Sequence
  synthetic circulating small noncoding RNA (sncRNA) 5' transfer RNA (tRNA) half
gtggcccgtacggggatcgaacc

SEQ ID NO: 21102 - DNA, 13 bp, Artificial Sequence
  synthetic circulating small noncoding RNA (sncRNA) 5' transfer RNA (tRNA) half
aacgcagagtact

SEQ ID NO: 21103 - DNA, 17 bp, Artificial Sequence
  synthetic circulating small noncoding RNA (sncRNA) 5' transfer RNA (tRNA) half
gcccgtacggggatcga

SEQ ID NO: 21104 - DNA, 23 bp, Artificial Sequence
  synthetic circulating small noncoding RNA (sncRNA) 5' transfer RNA (tRNA) half
ctgatgctctaccgactgagcta

SEQ ID NO: 21105 - DNA, 8 bp, Artificial Sequence
  synthetic circulating small noncoding RNA (sncRNA) 5' transfer RNA (tRNA) half
accgccgc

SEQ ID NO: 21106 - DNA, 9 bp, Artificial Sequence
  synthetic circulating small noncoding RNA (sncRNA) 5' transfer RNA (tRNA) half
gcccctcac

SEQ ID NO: 21107 - DNA, 15 bp, Artificial Sequence
  synthetic circulating small noncoding RNA (sncRNA) 5' transfer RNA (tRNA) half
ctgagctataccccc

SEQ ID NO: 21108 - DNA, 25 bp, Artificial Sequence
  synthetic circulating small noncoding RNA (sncRNA) 5' transfer RNA (tRNA) half
ctgggttcgaatcccagcggggcct

SEQ ID NO: 21109 - DNA, 15 bp, Artificial Sequence
  synthetic circulating small noncoding RNA (sncRNA) 5' transfer RNA (tRNA) half
cgagccggactcgaa

SEQ ID NO: 21110 - DNA, 14 bp, Artificial Sequence
  synthetic circulating small noncoding RNA (sncRNA) 5' transfer RNA (tRNA) half
tgggctcgtccggg

SEQ ID NO: 21111 - DNA, 21 bp, Artificial Sequence
  synthetic circulating small noncoding RNA (sncRNA) 5' transfer RNA (tRNA) half
gtgtagtggttatcacgctcg

SEQ ID NO: 21112 - DNA, 17 bp, Artificial Sequence
  synthetic circulating small noncoding RNA (sncRNA) 5' transfer RNA (tRNA) half
ggttcgattccccgacg

SEQ ID NO: 21113 - DNA, 10 bp, Artificial Sequence
  synthetic circulating small noncoding RNA (sncRNA) 5' transfer RNA (tRNA) half
cgctggttcg

SEQ ID NO: 21114 - DNA, 20 bp, Artificial Sequence
  synthetic circulating small noncoding RNA (sncRNA) 5' transfer RNA (tRNA) half
cgaaaccgggcggaaacaac

SEQ ID NO: 21115 - DNA, 19 bp, Artificial Sequence
  synthetic circulating small noncoding RNA (sncRNA) 5' transfer RNA (tRNA) half
ccccgacgtgatttgaaca

SEQ ID NO: 21116 - DNA, 17 bp, Artificial Sequence
  synthetic circulating small noncoding RNA (sncRNA) 5' transfer RNA (tRNA) half
agaccgctcggccatcc

SEQ ID NO: 21117 - DNA, 19 bp, Artificial Sequence
  synthetic circulating small noncoding RNA (sncRNA) 5' transfer RNA (tRNA) half
gtctgatgctctaccaact

SEQ ID NO: 21118 - DNA, 23 bp, Artificial Sequence
  synthetic circulating small noncoding RNA (sncRNA) 5' transfer RNA (tRNA) half
ttccgctgcgccactctgctact

SEQ ID NO: 21119 - DNA, 23 bp, Artificial Sequence
  synthetic circulating small noncoding RNA (sncRNA) 5' transfer RNA (tRNA) half
cgtcaggatggccgagcggtcta

SEQ ID NO: 21120 - DNA, 25 bp, Artificial Sequence
  synthetic circulating small noncoding RNA (sncRNA) 5' transfer RNA (tRNA) half
taaaccaggggtcgcgagttcaaat

SEQ ID NO: 21121 - DNA, 17 bp, Artificial Sequence
  synthetic circulating small noncoding RNA (sncRNA) 5' transfer RNA (tRNA) half
tcgcgacccctggttta

SEQ ID NO: 21122 - DNA, 9 bp, Artificial Sequence
  synthetic circulating small noncoding RNA (sncRNA) 5' transfer RNA (tRNA) half
ccggggctc

SEQ ID NO: 21123 - DNA, 18 bp, Artificial Sequence
  synthetic circulating small noncoding RNA (sncRNA) 5' transfer RNA (tRNA) half
gaacccgggcctcccgcg

SEQ ID NO: 21124 - DNA, 26 bp, Artificial Sequence
  synthetic circulating small noncoding RNA (sncRNA) 5' transfer RNA (tRNA) half
cgggttcgactcccggtatgggaaca

SEQ ID NO: 21125 - DNA, 13 bp, Artificial Sequence
  synthetic circulating small noncoding RNA (sncRNA) 5' transfer RNA (tRNA) half
ttcggttcccggc

SEQ ID NO: 21126 - DNA, 34 bp, Artificial Sequence
  synthetic circulating small noncoding RNA (sncRNA) 5' transfer RNA (tRNA) half
tctcatgctctaccgactgagctagccgggcgct

SEQ ID NO: 21127 - DNA, 32 bp, Artificial Sequence
  synthetic circulating small noncoding RNA (sncRNA) 5' transfer RNA (tRNA) half
ggtttccgtagtgtagtggttatcacgttcgc

SEQ ID NO: 21128 - DNA, 38 bp, Artificial Sequence
  synthetic circulating small noncoding RNA (sncRNA) 5' transfer RNA (tRNA) half
aggcgtccctgggtgggctcgaaccaccaacctttcgg

SEQ ID NO: 21129 - DNA, 23 bp, Artificial Sequence
  synthetic circulating small noncoding RNA (sncRNA) 5' transfer RNA (tRNA) half
gagttcaaatctcggtggaacct

SEQ ID NO: 21130 - DNA, 37 bp, Artificial Sequence
  synthetic circulating small noncoding RNA (sncRNA) 5' transfer RNA (tRNA) half
agtggtagaattctcgcctgccacgcgggaggcccgg

SEQ ID NO: 21131 - DNA, 25 bp, Artificial Sequence
  synthetic circulating small noncoding RNA (sncRNA) 5' transfer RNA (tRNA) half
ctcgcacccgaagcgagaatcatac

SEQ ID NO: 21132 - DNA, 39 bp, Artificial Sequence
  synthetic circulating small noncoding RNA (sncRNA) 5' transfer RNA (tRNA) half
gcgtccctgggtgggctcgaaccaccaacctttcggtta

SEQ ID NO: 21133 - DNA, 16 bp, Artificial Sequence
  synthetic circulating small noncoding RNA (sncRNA) 5' transfer RNA (tRNA) half
gtctgatgctctacca

SEQ ID NO: 21134 - DNA, 28 bp, Artificial Sequence
  synthetic circulating small noncoding RNA (sncRNA) 5' transfer RNA (tRNA) half
aggtccccggttcgaaaccgggcggaaa

SEQ ID NO: 21135 - DNA, 12 bp, Artificial Sequence
  synthetic circulating small noncoding RNA (sncRNA) 5' transfer RNA (tRNA) half
cgctttgggtgc

SEQ ID NO: 21136 - DNA, 22 bp, Artificial Sequence
  synthetic circulating small noncoding RNA (sncRNA) 5' transfer RNA (tRNA) half
gttagcactctggactctgaat

SEQ ID NO: 21137 - DNA, 11 bp, Artificial Sequence
  synthetic circulating small noncoding RNA (sncRNA) 5' transfer RNA (tRNA) half
tggcgcagcgg

SEQ ID NO: 21138 - DNA, 20 bp, Artificial Sequence
  synthetic circulating small noncoding RNA (sncRNA) 5' transfer RNA (tRNA) half
attccggctcgaaggacttc

SEQ ID NO: 21139 - DNA, 20 bp, Artificial Sequence
  synthetic circulating small noncoding RNA (sncRNA) 5' transfer RNA (tRNA) half
agtggttatcacgctcgcct

SEQ ID NO: 21140 - DNA, 8 bp, Artificial Sequence
  synthetic circulating small noncoding RNA (sncRNA) 5' transfer RNA (tRNA) half
gggattcg

SEQ ID NO: 21141 - DNA, 34 bp, Artificial Sequence
  synthetic circulating small noncoding RNA (sncRNA) 5' transfer RNA (tRNA) half
actctggcgggactcgaacccgcaacctttgaat

SEQ ID NO: 21142 - DNA, 24 bp, Artificial Sequence
  synthetic circulating small noncoding RNA (sncRNA) 5' transfer RNA (tRNA) half
ttcaattccacctttcgggcggga

SEQ ID NO: 21143 - DNA, 16 bp, Artificial Sequence
  synthetic circulating small noncoding RNA (sncRNA) 5' transfer RNA (tRNA) half
caggagtcgaacctgg

SEQ ID NO: 21144 - DNA, 30 bp, Artificial Sequence
  synthetic circulating small noncoding RNA (sncRNA) 5' transfer RNA (tRNA) half
tgagattaagagtctcatgctctaccgact

SEQ ID NO: 21145 - DNA, 15 bp, Artificial Sequence
  synthetic circulating small noncoding RNA (sncRNA) 5' transfer RNA (tRNA) half
ccattcttgcgaccc

SEQ ID NO: 21146 - DNA, 14 bp, Artificial Sequence
  synthetic circulating small noncoding RNA (sncRNA) 5' transfer RNA (tRNA) half
cttagaccactcgg

SEQ ID NO: 21147 - DNA, 27 bp, Artificial Sequence
  synthetic circulating small noncoding RNA (sncRNA) 5' transfer RNA (tRNA) half
cggatcgctggattcagagtccagagt

SEQ ID NO: 21148 - DNA, 33 bp, Artificial Sequence
  synthetic circulating small noncoding RNA (sncRNA) 5' transfer RNA (tRNA) half
gacaggcggggatactaaccactatactaacga

SEQ ID NO: 21149 - DNA, 31 bp, Artificial Sequence
  synthetic circulating small noncoding RNA (sncRNA) 5' transfer RNA (tRNA) half
ggctagctcagtcggtagagcatgagactct

SEQ ID NO: 21150 - DNA, 29 bp, Artificial Sequence
  synthetic circulating small noncoding RNA (sncRNA) 5' transfer RNA (tRNA) half
gcgagcgctctaccatttgagctaatccc

SEQ ID NO: 21151 - DNA, 24 bp, Artificial Sequence
  synthetic circulating small noncoding RNA (sncRNA) 5' transfer RNA (tRNA) half
ggtcgagccagccaggagtcgaac

SEQ ID NO: 21152 - DNA, 15 bp, Artificial Sequence
  synthetic circulating small noncoding RNA (sncRNA) 5' transfer RNA (tRNA) half
ctcggattcgaaccg

SEQ ID NO: 21153 - DNA, 19 bp, Artificial Sequence
  synthetic circulating small noncoding RNA (sncRNA) 5' transfer RNA (tRNA) half
gtagtcggcaggattcgaa

SEQ ID NO: 21154 - DNA, 22 bp, Artificial Sequence
  synthetic circulating small noncoding RNA (sncRNA) 5' transfer RNA (tRNA) half
cgaaccccgtccgtgcctgcgt

SEQ ID NO: 21155 - DNA, 14 bp, Artificial Sequence
  synthetic circulating small noncoding RNA (sncRNA) 5' transfer RNA (tRNA) half
gccgctggtgtagt

SEQ ID NO: 21156 - DNA, 26 bp, Artificial Sequence
  synthetic circulating small noncoding RNA (sncRNA) 5' transfer RNA (tRNA) half
ttcagagtccagagtgctaaccatta

SEQ ID NO: 21157 - DNA, 22 bp, Artificial Sequence
  synthetic circulating small noncoding RNA (sncRNA) 5' transfer RNA (tRNA) half
gacgaggtggccgagtggttaa

SEQ ID NO: 21158 - DNA, 14 bp, Artificial Sequence
  synthetic circulating small noncoding RNA (sncRNA) 5' transfer RNA (tRNA) half
gaggtcgatggatc

SEQ ID NO: 21159 - DNA, 13 bp, Artificial Sequence
  synthetic circulating small noncoding RNA (sncRNA) 5' transfer RNA (tRNA) half
tgccggggctcga

SEQ ID NO: 21160 - DNA, 11 bp, Artificial Sequence
  synthetic circulating small noncoding RNA (sncRNA) 5' transfer RNA (tRNA) half
ctcggttcgaa

SEQ ID NO: 21161 - DNA, 13 bp, Artificial Sequence
  synthetic circulating small noncoding RNA (sncRNA) 5' transfer RNA (tRNA) half
gtggcgcaattgg

SEQ ID NO: 21162 - DNA, 26 bp, Artificial Sequence
  synthetic circulating small noncoding RNA (sncRNA) 5' transfer RNA (tRNA) half
tgctttacacgcagaaggtcctgggt

SEQ ID NO: 21163 - DNA, 33 bp, Artificial Sequence
  synthetic circulating small noncoding RNA (sncRNA) 5' transfer RNA (tRNA) half
gccgcggcccgggttcgattcccggtcagggaa

SEQ ID NO: 21164 - DNA, 23 bp, Artificial Sequence
  synthetic circulating small noncoding RNA (sncRNA) 5' transfer RNA (tRNA) half
gttcgagtcccatctggggtggt

SEQ ID NO: 21165 - DNA, 19 bp, Artificial Sequence
  synthetic circulating small noncoding RNA (sncRNA) 5' transfer RNA (tRNA) half
agctgtagtcgtggccgag

SEQ ID NO: 21166 - DNA, 14 bp, Artificial Sequence
  synthetic circulating small noncoding RNA (sncRNA) 5' transfer RNA (tRNA) half
cgggcgggaacaac

SEQ ID NO: 21167 - DNA, 35 bp, Artificial Sequence
  synthetic circulating small noncoding RNA (sncRNA) 5' transfer RNA (tRNA) half
ggttccatggtgtaatggtgagcactctggactct

SEQ ID NO: 21168 - DNA, 30 bp, Artificial Sequence
  synthetic circulating small noncoding RNA (sncRNA) 5' transfer RNA (tRNA) half
gcgcccgaacagggacttgaaccctggacc

SEQ ID NO: 21169 - DNA, 7 bp, Artificial Sequence
  synthetic circulating small noncoding RNA (sncRNA) 5' transfer RNA (tRNA) half
cgccgaa

SEQ ID NO: 21170 - DNA, 21 bp, Artificial Sequence
  synthetic circulating small noncoding RNA (sncRNA) 5' transfer RNA (tRNA) half
atcccggacgagccccatctt

SEQ ID NO: 21171 - DNA, 8 bp, Artificial Sequence
  synthetic circulating small noncoding RNA (sncRNA) 5' transfer RNA (tRNA) half
cgggcctc

SEQ ID NO: 21172 - DNA, 31 bp, Artificial Sequence
  synthetic circulating small noncoding RNA (sncRNA) 5' transfer RNA (tRNA) half
gtgagagcgccgaatcctaaccactagacca

SEQ ID NO: 21173 - DNA, 25 bp, Artificial Sequence
  synthetic circulating small noncoding RNA (sncRNA) 5' transfer RNA (tRNA) half
acaggattcgaacctgtgcggggaa

SEQ ID NO: 21174 - DNA, 16 bp, Artificial Sequence
  synthetic circulating small noncoding RNA (sncRNA) 5' transfer RNA (tRNA) half
agggggcacccggatt

SEQ ID NO: 21175 - DNA, 15 bp, Artificial Sequence
  synthetic circulating small noncoding RNA (sncRNA) 5' transfer RNA (tRNA) half
aacctagaatcttct

SEQ ID NO: 21176 - DNA, 18 bp, Artificial Sequence
  synthetic circulating small noncoding RNA (sncRNA) 5' transfer RNA (tRNA) half
agtctgtagagcatgaga

SEQ ID NO: 21177 - DNA, 25 bp, Artificial Sequence
  synthetic circulating small noncoding RNA (sncRNA) 5' transfer RNA (tRNA) half
taacccagaggtcgatggatcgaaa

SEQ ID NO: 21178 - DNA, 27 bp, Artificial Sequence
  synthetic circulating small noncoding RNA (sncRNA) 5' transfer RNA (tRNA) half
gttcgattccccgacggggagtctgga

SEQ ID NO: 21179 - DNA, 11 bp, Artificial Sequence
  synthetic circulating small noncoding RNA (sncRNA) 5' transfer RNA (tRNA) half
gtcccgggttc

SEQ ID NO: 21180 - DNA, 12 bp, Artificial Sequence
  synthetic circulating small noncoding RNA (sncRNA) 5' transfer RNA (tRNA) half
tcggcgctctca

SEQ ID NO: 21181 - DNA, 22 bp, Artificial Sequence
  synthetic circulating small noncoding RNA (sncRNA) 5' transfer RNA (tRNA) half
gggactcgaacccacaatccct

SEQ ID NO: 21182 - DNA, 12 bp, Artificial Sequence
  synthetic circulating small noncoding RNA (sncRNA) 5' transfer RNA (tRNA) half
cgtggcaggcga

SEQ ID NO: 21183 - DNA, 22 bp, Artificial Sequence
  synthetic circulating small noncoding RNA (sncRNA) 5' transfer RNA (tRNA) half
ctggtagtctagtggttaggat

SEQ ID NO: 21184 - DNA, 18 bp, Artificial Sequence
  synthetic circulating small noncoding RNA (sncRNA) 5' transfer RNA (tRNA) half
gggtatgattctcgcttt

SEQ ID NO: 21185 - DNA, 13 bp, Artificial Sequence
  synthetic circulating small noncoding RNA (sncRNA) 5' transfer RNA (tRNA) half
gtctagtggtatg

SEQ ID NO: 21186 - DNA, 22 bp, Artificial Sequence
  synthetic circulating small noncoding RNA (sncRNA) 5' transfer RNA (tRNA) half
tggtcatcacgctcgcctcaca

SEQ ID NO: 21187 - DNA, 16 bp, Artificial Sequence
  synthetic circulating small noncoding RNA (sncRNA) 5' transfer RNA (tRNA) half
gtcagaagtgggattc

SEQ ID NO: 21188 - DNA, 34 bp, Artificial Sequence
  synthetic circulating small noncoding RNA (sncRNA) 5' transfer RNA (tRNA) half
gagggggcacccggatttgaaccggggacctctt

SEQ ID NO: 21189 - DNA, 25 bp, Artificial Sequence
  synthetic circulating small noncoding RNA (sncRNA) 5' transfer RNA (tRNA) half
atttccctgaccgggaatcgaaccc

SEQ ID NO: 21190 - DNA, 45 bp, Artificial Sequence
  synthetic circulating small noncoding RNA (sncRNA) 5' transfer RNA (tRNA) half
cgtagtcggcaggattcgaacctgcgcggggaaaccccaatggat

SEQ ID NO: 21191 - DNA, 18 bp, Artificial Sequence
  synthetic circulating small noncoding RNA (sncRNA) 5' transfer RNA (tRNA) half
ccgactgagctagccggg

SEQ ID NO: 21192 - DNA, 18 bp, Artificial Sequence
  synthetic circulating small noncoding RNA (sncRNA) 5' transfer RNA (tRNA) half
aggcgaacgtgataacca

SEQ ID NO: 21193 - DNA, 27 bp, Artificial Sequence
  synthetic circulating small noncoding RNA (sncRNA) 5' transfer RNA (tRNA) half
cgacgtgattcgaacacgcagccttct

SEQ ID NO: 21194 - DNA, 15 bp, Artificial Sequence
  synthetic circulating small noncoding RNA (sncRNA) 5' transfer RNA (tRNA) half
ggtgtaatggttagc

SEQ ID NO: 21195 - DNA, 32 bp, Artificial Sequence
  synthetic circulating small noncoding RNA (sncRNA) 5' transfer RNA (tRNA) half
ggtgaaaaccaggaatcctaaccgctagacca

SEQ ID NO: 21196 - DNA, 21 bp, Artificial Sequence
  synthetic circulating small noncoding RNA (sncRNA) 5' transfer RNA (tRNA) half
cgcctccccgtcggggaatcg

SEQ ID NO: 21197 - DNA, 17 bp, Artificial Sequence
  synthetic circulating small noncoding RNA (sncRNA) 5' transfer RNA (tRNA) half
aacctagaatcttctga

SEQ ID NO: 21198 - DNA, 34 bp, Artificial Sequence
  synthetic circulating small noncoding RNA (sncRNA) 5' transfer RNA (tRNA) half
cctccctggtggtctagtggttaggattcggcgc

SEQ ID NO: 21199 - DNA, 10 bp, Artificial Sequence
  synthetic circulating small noncoding RNA (sncRNA) 5' transfer RNA (tRNA) half
tcgaacctac

SEQ ID NO: 21200 - DNA, 20 bp, Artificial Sequence
  synthetic circulating small noncoding RNA (sncRNA) 5' transfer RNA (tRNA) half
atcccaccgctgccaaccgg

SEQ ID NO: 21201 - DNA, 21 bp, Artificial Sequence
  synthetic circulating small noncoding RNA (sncRNA) 5' transfer RNA (tRNA) half
gcggttatcacgtctgcttta

SEQ ID NO: 21202 - DNA, 24 bp, Artificial Sequence
  synthetic circulating small noncoding RNA (sncRNA) 5' transfer RNA (tRNA) half
atcgaacccgggtcaactgcttgg

SEQ ID NO: 21203 - DNA, 38 bp, Artificial Sequence
  synthetic circulating small noncoding RNA (sncRNA) 5' transfer RNA (tRNA) half
ccgtagtgtagtggttatcacgttcgcctaacacgcga

SEQ ID NO: 21204 - DNA, 18 bp, Artificial Sequence
  synthetic circulating small noncoding RNA (sncRNA) 5' transfer RNA (tRNA) half
ttcccacaccgggagtcg

SEQ ID NO: 21205 - DNA, 18 bp, Artificial Sequence
  synthetic circulating small noncoding RNA (sncRNA) 5' transfer RNA (tRNA) half
gccttagaccactcggcc

SEQ ID NO: 21206 - DNA, 28 bp, Artificial Sequence
  synthetic circulating small noncoding RNA (sncRNA) 5' transfer RNA (tRNA) half
aggtcccgggttcaaatcccggacgagc

SEQ ID NO: 21207 - DNA, 19 bp, Artificial Sequence
  synthetic circulating small noncoding RNA (sncRNA) 5' transfer RNA (tRNA) half
aatcacgtcggggtcatct

SEQ ID NO: 21208 - DNA, 13 bp, Artificial Sequence
  synthetic circulating small noncoding RNA (sncRNA) 5' transfer RNA (tRNA) half
agattaagagtct

SEQ ID NO: 21209 - DNA, 9 bp, Artificial Sequence
  synthetic circulating small noncoding RNA (sncRNA) 5' transfer RNA (tRNA) half
gctcgaaca

SEQ ID NO: 21210 - DNA, 12 bp, Artificial Sequence
  synthetic circulating small noncoding RNA (sncRNA) 5' transfer RNA (tRNA) half
agttggtagagc

SEQ ID NO: 21211 - DNA, 29 bp, Artificial Sequence
  synthetic circulating small noncoding RNA (sncRNA) 5' transfer RNA (tRNA) half
aacccgggccgcggcggtgagagcgccga

SEQ ID NO: 21212 - DNA, 12 bp, Artificial Sequence
  synthetic circulating small noncoding RNA (sncRNA) 5' transfer RNA (tRNA) half
cgccgctggtgt

SEQ ID NO: 21213 - DNA, 14 bp, Artificial Sequence
  synthetic circulating small noncoding RNA (sncRNA) 5' transfer RNA (tRNA) half
gaaccagggacctt

SEQ ID NO: 21214 - DNA, 35 bp, Artificial Sequence
  synthetic circulating small noncoding RNA (sncRNA) 5' transfer RNA (tRNA) half
cgcccggatgatcctcagtggtctggggtgcaggc

SEQ ID NO: 21215 - DNA, 20 bp, Artificial Sequence
  synthetic circulating small noncoding RNA (sncRNA) 5' transfer RNA (tRNA) half
cgaccttcagattatgagac

SEQ ID NO: 21216 - DNA, 40 bp, Artificial Sequence
  synthetic circulating small noncoding RNA (sncRNA) 5' transfer RNA (tRNA) half
taagacttaaaaccttgttcccagaggttcaaatcctctc

SEQ ID NO: 21217 - DNA, 27 bp, Artificial Sequence
  synthetic circulating small noncoding RNA (sncRNA) 5' transfer RNA (tRNA) half
atccatcgacctctgggttatgggccc

SEQ ID NO: 21218 - DNA, 32 bp, Artificial Sequence
  synthetic circulating small noncoding RNA (sncRNA) 5' transfer RNA (tRNA) half
gccttaaccactcggccacgactacagaccat

SEQ ID NO: 21219 - DNA, 22 bp, Artificial Sequence
  synthetic circulating small noncoding RNA (sncRNA) 5' transfer RNA (tRNA) half
gttcgaaccccgtccgtgcctg

SEQ ID NO: 21220 - DNA, 21 bp, Artificial Sequence
  synthetic circulating small noncoding RNA (sncRNA) 5' transfer RNA (tRNA) half
ccactcggccatcgctgctac

SEQ ID NO: 21221 - DNA, 36 bp, Artificial Sequence
  synthetic circulating small noncoding RNA (sncRNA) 5' transfer RNA (tRNA) half
gagctggggattgtgggttcgagtcccatctgggtc

SEQ ID NO: 21222 - DNA, 18 bp, Artificial Sequence
  synthetic circulating small noncoding RNA (sncRNA) 5' transfer RNA (tRNA) half
ccgcagcaacctcggttc

SEQ ID NO: 21223 - DNA, 39 bp, Artificial Sequence
  synthetic circulating small noncoding RNA (sncRNA) 5' transfer RNA (tRNA) half
agagcgccgaatcctaaccactagaccaccagggaagtt

SEQ ID NO: 21224 - DNA, 18 bp, Artificial Sequence
  synthetic circulating small noncoding RNA (sncRNA) 5' transfer RNA (tRNA) half
aggccccagcgagatttg

SEQ ID NO: 21225 - DNA, 13 bp, Artificial Sequence
  synthetic circulating small noncoding RNA (sncRNA) 5' transfer RNA (tRNA) half
cacgcgggaggcc

SEQ ID NO: 21226 - DNA, 30 bp, Artificial Sequence
  synthetic circulating small noncoding RNA (sncRNA) 5' transfer RNA (tRNA) half
acctccccgtcggggaattgaaccccggtc

SEQ ID NO: 21227 - DNA, 19 bp, Artificial Sequence
  synthetic circulating small noncoding RNA (sncRNA) 5' transfer RNA (tRNA) half
agtgctagccattacacca

SEQ ID NO: 21228 - DNA, 8 bp, Artificial Sequence
  synthetic circulating small noncoding RNA (sncRNA) 5' transfer RNA (tRNA) half
ggtcccgg

SEQ ID NO: 21229 - DNA, 30 bp, Artificial Sequence
  synthetic circulating small noncoding RNA (sncRNA) 5' transfer RNA (tRNA) half
tagtgccgagactcggattcgaaccgaggt

SEQ ID NO: 21230 - DNA, 19 bp, Artificial Sequence
  synthetic circulating small noncoding RNA (sncRNA) 5' transfer RNA (tRNA) half
agtcaaatgctctacccct

SEQ ID NO: 21231 - DNA, 33 bp, Artificial Sequence
  synthetic circulating small noncoding RNA (sncRNA) 5' transfer RNA (tRNA) half
ttcagtggtagaattctcgcctgccacgcggga

SEQ ID NO: 21232 - DNA, 12 bp, Artificial Sequence
  synthetic circulating small noncoding RNA (sncRNA) 5' transfer RNA (tRNA) half
gggtgggctcga

SEQ ID NO: 21233 - DNA, 20 bp, Artificial Sequence
  synthetic circulating small noncoding RNA (sncRNA) 5' transfer RNA (tRNA) half
aacccacgcccccgaagaga

SEQ ID NO: 21234 - DNA, 8 bp, Artificial Sequence
  synthetic circulating small noncoding RNA (sncRNA) 5' transfer RNA (tRNA) half
caatcggt

SEQ ID NO: 21235 - DNA, 21 bp, Artificial Sequence
  synthetic circulating small noncoding RNA (sncRNA) 5' transfer RNA (tRNA) half
gagttcaaatctcggtgggac

SEQ ID NO: 21236 - DNA, 30 bp, Artificial Sequence
  synthetic circulating small noncoding RNA (sncRNA) 5' transfer RNA (tRNA) half
attgcaggttcgagtcctgccgcggtcgac

SEQ ID NO: 21237 - DNA, 13 bp, Artificial Sequence
  synthetic circulating small noncoding RNA (sncRNA) 5' transfer RNA (tRNA) half
ggatactaaccac

SEQ ID NO: 21238 - DNA, 16 bp, Artificial Sequence
  synthetic circulating small noncoding RNA (sncRNA) 5' transfer RNA (tRNA) half
cgattcccggccaatg

SEQ ID NO: 21239 - DNA, 13 bp, Artificial Sequence
  synthetic circulating small noncoding RNA (sncRNA) 5' transfer RNA (tRNA) half
gcccaagcatttt

SEQ ID NO: 21240 - DNA, 18 bp, Artificial Sequence
  synthetic circulating small noncoding RNA (sncRNA) 5' transfer RNA (tRNA) half
tggttcagtggtagaatt

SEQ ID NO: 21241 - DNA, 22 bp, Artificial Sequence
  synthetic circulating small noncoding RNA (sncRNA) 5' transfer RNA (tRNA) half
acccgggccgcctgggtgaaaa

SEQ ID NO: 21242 - DNA, 31 bp, Artificial Sequence
  synthetic circulating small noncoding RNA (sncRNA) 5' transfer RNA (tRNA) half
gggtcgtgggttcgagccccacgttgggcgc

SEQ ID NO: 21243 - DNA, 14 bp, Artificial Sequence
  synthetic circulating small noncoding RNA (sncRNA) 5' transfer RNA (tRNA) half
aggcgagcgtgatg

SEQ ID NO: 21244 - DNA, 20 bp, Artificial Sequence
  synthetic circulating small noncoding RNA (sncRNA) 5' transfer RNA (tRNA) half
actcgcgacccctggtttac

SEQ ID NO: 21245 - DNA, 21 bp, Artificial Sequence
  synthetic circulating small noncoding RNA (sncRNA) 5' transfer RNA (tRNA) half
gccgaacgcgctaaccgattg

SEQ ID NO: 21246 - DNA, 10 bp, Artificial Sequence
  synthetic circulating small noncoding RNA (sncRNA) 5' transfer RNA (tRNA) half
cttcgagccg

SEQ ID NO: 21247 - DNA, 20 bp, Artificial Sequence
  synthetic circulating small noncoding RNA (sncRNA) 5' transfer RNA (tRNA) half
gttcgattcccggcccatgc

SEQ ID NO: 21248 - DNA, 30 bp, Artificial Sequence
  synthetic circulating small noncoding RNA (sncRNA) 5' transfer RNA (tRNA) half
aaggtccctggttcgatcccgggtttcggc

SEQ ID NO: 21249 - DNA, 33 bp, Artificial Sequence
  synthetic circulating small noncoding RNA (sncRNA) 5' transfer RNA (tRNA) half
gggagaccggggttcgattccccgacggggaga

SEQ ID NO: 21250 - DNA, 27 bp, Artificial Sequence
  synthetic circulating small noncoding RNA (sncRNA) 5' transfer RNA (tRNA) half
cgaagggactcgaaccctcaatcttct

SEQ ID NO: 21251 - DNA, 20 bp, Artificial Sequence
  synthetic circulating small noncoding RNA (sncRNA) 5' transfer RNA (tRNA) half
cacgcgaaaggtccccggtt

SEQ ID NO: 21252 - DNA, 19 bp, Artificial Sequence
  synthetic circulating small noncoding RNA (sncRNA) 5' transfer RNA (tRNA) half
tgaatccagcgacccgagt

SEQ ID NO: 21253 - DNA, 14 bp, Artificial Sequence
  synthetic circulating small noncoding RNA (sncRNA) 5' transfer RNA (tRNA) half
ccgctagaccatgt

SEQ ID NO: 21254 - DNA, 24 bp, Artificial Sequence
  synthetic circulating small noncoding RNA (sncRNA) 5' transfer RNA (tRNA) half
cccgggttcgactcccggtatggg

SEQ ID NO: 21255 - DNA, 19 bp, Artificial Sequence
  synthetic circulating small noncoding RNA (sncRNA) 5' transfer RNA (tRNA) half
gtcgagccagccaggagtc

SEQ ID NO: 21256 - DNA, 11 bp, Artificial Sequence
  synthetic circulating small noncoding RNA (sncRNA) 5' transfer RNA (tRNA) half
gttcgaatcct

SEQ ID NO: 21257 - DNA, 10 bp, Artificial Sequence
  synthetic circulating small noncoding RNA (sncRNA) 5' transfer RNA (tRNA) half
gacctcttga

SEQ ID NO: 21258 - DNA, 15 bp, Artificial Sequence
  synthetic circulating small noncoding RNA (sncRNA) 5' transfer RNA (tRNA) half
gcagcgccttagacc

SEQ ID NO: 21259 - DNA, 8 bp, Artificial Sequence
  synthetic circulating small noncoding RNA (sncRNA) 5' transfer RNA (tRNA) half
cccgggcg

SEQ ID NO: 21260 - DNA, 14 bp, Artificial Sequence
  synthetic circulating small noncoding RNA (sncRNA) 5' transfer RNA (tRNA) half
tttgaaccggggac

SEQ ID NO: 21261 - DNA, 23 bp, Artificial Sequence
  synthetic circulating small noncoding RNA (sncRNA) 5' transfer RNA (tRNA) half
tccctggtggtctagtggttagg

SEQ ID NO: 21262 - DNA, 18 bp, Artificial Sequence
  synthetic circulating small noncoding RNA (sncRNA) 5' transfer RNA (tRNA) half
cagtggtagagcgcatgc

SEQ ID NO: 21263 - DNA, 24 bp, Artificial Sequence
  synthetic circulating small noncoding RNA (sncRNA) 5' transfer RNA (tRNA) half
tagcatgcacgaggccccgggttc

SEQ ID NO: 21264 - DNA, 7 bp, Artificial Sequence
  synthetic circulating small noncoding RNA (sncRNA) 5' transfer RNA (tRNA) half
tgccgac

SEQ ID NO: 21265 - DNA, 8 bp, Artificial Sequence
  synthetic circulating small noncoding RNA (sncRNA) 5' transfer RNA (tRNA) half
gttcgcct

SEQ ID NO: 21266 - DNA, 15 bp, Artificial Sequence
  synthetic circulating small noncoding RNA (sncRNA) 5' transfer RNA (tRNA) half
ggttagagcgtggtg

SEQ ID NO: 21267 - DNA, 24 bp, Artificial Sequence
  synthetic circulating small noncoding RNA (sncRNA) 5' transfer RNA (tRNA) half
cggttcgaatccgagtcacggcat

SEQ ID NO: 21268 - DNA, 23 bp, Artificial Sequence
  synthetic circulating small noncoding RNA (sncRNA) 5' transfer RNA (tRNA) half
gagggggcacccggatttgaacc

SEQ ID NO: 21269 - DNA, 23 bp, Artificial Sequence
  synthetic circulating small noncoding RNA (sncRNA) 5' transfer RNA (tRNA) half
ttcgaatcccactcctgacagcc

SEQ ID NO: 21270 - DNA, 11 bp, Artificial Sequence
  synthetic circulating small noncoding RNA (sncRNA) 5' transfer RNA (tRNA) half
cggcaaccgcg

SEQ ID NO: 21271 - DNA, 37 bp, Artificial Sequence
  synthetic circulating small noncoding RNA (sncRNA) 5' transfer RNA (tRNA) half
aggcgtccctgggtgggctcgaaccaccaacctttcg

SEQ ID NO: 21272 - DNA, 14 bp, Artificial Sequence
  synthetic circulating small noncoding RNA (sncRNA) 5' transfer RNA (tRNA) half
ccgactgagctatc

SEQ ID NO: 21273 - DNA, 16 bp, Artificial Sequence
  synthetic circulating small noncoding RNA (sncRNA) 5' transfer RNA (tRNA) half
gttcgactcccggtat

SEQ ID NO: 21274 - DNA, 6 bp, Artificial Sequence
  synthetic circulating small noncoding RNA (sncRNA) 5' transfer RNA (tRNA) half
caggcg

SEQ ID NO: 21275 - DNA, 27 bp, Artificial Sequence
  synthetic circulating small noncoding RNA (sncRNA) 5' transfer RNA (tRNA) half
gccagccaggagtcgaacctagaatct

SEQ ID NO: 21276 - DNA, 27 bp, Artificial Sequence
  synthetic circulating small noncoding RNA (sncRNA) 5' transfer RNA (tRNA) half
aggccgcggcggtgagagcgccaaatc

SEQ ID NO: 21277 - DNA, 34 bp, Artificial Sequence
  synthetic circulating small noncoding RNA (sncRNA) 5' transfer RNA (tRNA) half
gccgaatcctaaccactagaccaccagggaaact

SEQ ID NO: 21278 - DNA, 15 bp, Artificial Sequence
  synthetic circulating small noncoding RNA (sncRNA) 5' transfer RNA (tRNA) half
tgcagagtactaacc

SEQ ID NO: 21279 - DNA, 17 bp, Artificial Sequence
  synthetic circulating small noncoding RNA (sncRNA) 5' transfer RNA (tRNA) half
cgaacaggattcgaacc

SEQ ID NO: 21280 - DNA, 21 bp, Artificial Sequence
  synthetic circulating small noncoding RNA (sncRNA) 5' transfer RNA (tRNA) half
gcagctatgctcaccactata

SEQ ID NO: 21281 - DNA, 24 bp, Artificial Sequence
  synthetic circulating small noncoding RNA (sncRNA) 5' transfer RNA (tRNA) half
gacccagtggcctaatggataagg

SEQ ID NO: 21282 - DNA, 41 bp, Artificial Sequence
  synthetic circulating small noncoding RNA (sncRNA) 5' transfer RNA (tRNA) half
gtttccgtagtgtagtggttatcacgttcgcctaacacgcg

SEQ ID NO: 21283 - DNA, 18 bp, Artificial Sequence
  synthetic circulating small noncoding RNA (sncRNA) 5' transfer RNA (tRNA) half
gttatcacgtctgcttta

SEQ ID NO: 21284 - DNA, 24 bp, Artificial Sequence
  synthetic circulating small noncoding RNA (sncRNA) 5' transfer RNA (tRNA) half
gattatgagactgacgcgctacct

SEQ ID NO: 21285 - DNA, 11 bp, Artificial Sequence
  synthetic circulating small noncoding RNA (sncRNA) 5' transfer RNA (tRNA) half
caaagcgagaa

SEQ ID NO: 21286 - DNA, 12 bp, Artificial Sequence
  synthetic circulating small noncoding RNA (sncRNA) 5' transfer RNA (tRNA) half
ccccggcacctc

SEQ ID NO: 21287 - DNA, 23 bp, Artificial Sequence
  synthetic circulating small noncoding RNA (sncRNA) 5' transfer RNA (tRNA) half
cccgggttcgattcccgggcggc

SEQ ID NO: 21288 - DNA, 23 bp, Artificial Sequence
  synthetic circulating small noncoding RNA (sncRNA) 5' transfer RNA (tRNA) half
cgagttcaaatctcgctggggcc

SEQ ID NO: 21289 - DNA, 24 bp, Artificial Sequence
  synthetic circulating small noncoding RNA (sncRNA) 5' transfer RNA (tRNA) half
cgggttcgatccccgtacgggcca

SEQ ID NO: 21290 - DNA, 6 bp, Artificial Sequence
  synthetic circulating small noncoding RNA (sncRNA) 5' transfer RNA (tRNA) half
tccgac

SEQ ID NO: 21291 - DNA, 34 bp, Artificial Sequence
  synthetic circulating small noncoding RNA (sncRNA) 5' transfer RNA (tRNA) half
tgggtttccgtagtgtagtggttagcgcgttcgc

SEQ ID NO: 21292 - DNA, 27 bp, Artificial Sequence
  synthetic circulating small noncoding RNA (sncRNA) 5' transfer RNA (tRNA) half
ttggtctaggggtatgattctcgcttt

SEQ ID NO: 21293 - DNA, 24 bp, Artificial Sequence
  synthetic circulating small noncoding RNA (sncRNA) 5' transfer RNA (tRNA) half
ttcgactcccggtgtgggaacgcc

SEQ ID NO: 21294 - DNA, 33 bp, Artificial Sequence
  synthetic circulating small noncoding RNA (sncRNA) 5' transfer RNA (tRNA) half
cacccaggcggcccgggttcgactcccggtgtg

SEQ ID NO: 21295 - DNA, 19 bp, Artificial Sequence
  synthetic circulating small noncoding RNA (sncRNA) 5' transfer RNA (tRNA) half
ggttcgagcccacccaggg

SEQ ID NO: 21296 - DNA, 10 bp, Artificial Sequence
  synthetic circulating small noncoding RNA (sncRNA) 5' transfer RNA (tRNA) half
aggcggggat

SEQ ID NO: 21297 - DNA, 32 bp, Artificial Sequence
  synthetic circulating small noncoding RNA (sncRNA) 5' transfer RNA (tRNA) half
aggtgggactcgaacccacaatccctggctta

SEQ ID NO: 21298 - DNA, 20 bp, Artificial Sequence
  synthetic circulating small noncoding RNA (sncRNA) 5' transfer RNA (tRNA) half
taaatgccgtgactcggatt

SEQ ID NO: 21299 - DNA, 24 bp, Artificial Sequence
  synthetic circulating small noncoding RNA (sncRNA) 5' transfer RNA (tRNA) half
gggagaccggggttcgattccccg

SEQ ID NO: 21300 - DNA, 30 bp, Artificial Sequence
  synthetic circulating small noncoding RNA (sncRNA) 5' transfer RNA (tRNA) half
ggaggcccgggttcgattcccggcccatgc

SEQ ID NO: 21301 - DNA, 13 bp, Artificial Sequence
  synthetic circulating small noncoding RNA (sncRNA) 5' transfer RNA (tRNA) half
aacgagccacggt

SEQ ID NO: 21302 - DNA, 28 bp, Artificial Sequence
  synthetic circulating small noncoding RNA (sncRNA) 5' transfer RNA (tRNA) half
gtcgtgggttcgagccccacgttgggcg

SEQ ID NO: 21303 - DNA, 33 bp, Artificial Sequence
  synthetic circulating small noncoding RNA (sncRNA) 5' transfer RNA (tRNA) half
gtgccccgtgtgaggatcgaactcacgaccttc

SEQ ID NO: 21304 - DNA, 23 bp, Artificial Sequence
  synthetic circulating small noncoding RNA (sncRNA) 5' transfer RNA (tRNA) half
ttccttcgagccggattcgaacc

SEQ ID NO: 21305 - DNA, 28 bp, Artificial Sequence
  synthetic circulating small noncoding RNA (sncRNA) 5' transfer RNA (tRNA) half
ggcggcccgggttcgactcccggtgtgg

SEQ ID NO: 21306 - DNA, 13 bp, Artificial Sequence
  synthetic circulating small noncoding RNA (sncRNA) 5' transfer RNA (tRNA) half
cagagtggcgcag

SEQ ID NO: 21307 - DNA, 36 bp, Artificial Sequence
  synthetic circulating small noncoding RNA (sncRNA) 5' transfer RNA (tRNA) half
caggcggcccgggttcgactcccggtgtgggaacgc

SEQ ID NO: 21308 - DNA, 30 bp, Artificial Sequence
  synthetic circulating small noncoding RNA (sncRNA) 5' transfer RNA (tRNA) half
cagcgagatttgaactcgcgacccctggtt

SEQ ID NO: 21309 - DNA, 32 bp, Artificial Sequence
  synthetic circulating small noncoding RNA (sncRNA) 5' transfer RNA (tRNA) half
agtgggattcgaacccacgcctccaggggaga

SEQ ID NO: 21310 - DNA, 20 bp, Artificial Sequence
  synthetic circulating small noncoding RNA (sncRNA) 5' transfer RNA (tRNA) half
gacgacgaaggtgggattcg

SEQ ID NO: 21311 - DNA, 17 bp, Artificial Sequence
  synthetic circulating small noncoding RNA (sncRNA) 5' transfer RNA (tRNA) half
acgaccctgggattaag

SEQ ID NO: 21312 - DNA, 12 bp, Artificial Sequence
  synthetic circulating small noncoding RNA (sncRNA) 5' transfer RNA (tRNA) half
ctgagctaaccg

SEQ ID NO: 21313 - DNA, 40 bp, Artificial Sequence
  synthetic circulating small noncoding RNA (sncRNA) 5' transfer RNA (tRNA) half
gtatagtggttagtactctgcgttgtggccgcagcaacct

SEQ ID NO: 21314 - DNA, 13 bp, Artificial Sequence
  synthetic circulating small noncoding RNA (sncRNA) 5' transfer RNA (tRNA) half
cagcgacctaagg

SEQ ID NO: 21315 - DNA, 29 bp, Artificial Sequence
  synthetic circulating small noncoding RNA (sncRNA) 5' transfer RNA (tRNA) half
ttcgcgtgtgaggcgaacgtgataaccac

SEQ ID NO: 21316 - DNA, 20 bp, Artificial Sequence
  synthetic circulating small noncoding RNA (sncRNA) 5' transfer RNA (tRNA) half
aggttcgaatcctgccgact

SEQ ID NO: 21317 - DNA, 25 bp, Artificial Sequence
  synthetic circulating small noncoding RNA (sncRNA) 5' transfer RNA (tRNA) half
ggttcgattcccggccaatgcacga

SEQ ID NO: 21318 - DNA, 34 bp, Artificial Sequence
  synthetic circulating small noncoding RNA (sncRNA) 5' transfer RNA (tRNA) half
ccaggaatcctaaccgctagaccatgtgggaact

SEQ ID NO: 21319 - DNA, 12 bp, Artificial Sequence
  synthetic circulating small noncoding RNA (sncRNA) 5' transfer RNA (tRNA) half
accgggaatcga

SEQ ID NO: 21320 - DNA, 35 bp, Artificial Sequence
  synthetic circulating small noncoding RNA (sncRNA) 5' transfer RNA (tRNA) half
caggcgagaattctaccactgaaccaccaatgcga

SEQ ID NO: 21321 - DNA, 25 bp, Artificial Sequence
  synthetic circulating small noncoding RNA (sncRNA) 5' transfer RNA (tRNA) half
aaacccgggcctcccgcgtggcagg

SEQ ID NO: 21322 - DNA, 37 bp, Artificial Sequence
  synthetic circulating small noncoding RNA (sncRNA) 5' transfer RNA (tRNA) half
tccaagcagttgacccgggttcgattcccggccaacg

SEQ ID NO: 21323 - DNA, 21 bp, Artificial Sequence
  synthetic circulating small noncoding RNA (sncRNA) 5' transfer RNA (tRNA) half
tcgatgcccgcattctccagt

SEQ ID NO: 21324 - DNA, 28 bp, Artificial Sequence
  synthetic circulating small noncoding RNA (sncRNA) 5' transfer RNA (tRNA) half
gggatactcaccactatactaacgagga

SEQ ID NO: 21325 - DNA, 17 bp, Artificial Sequence
  synthetic circulating small noncoding RNA (sncRNA) 5' transfer RNA (tRNA) half
tagctcagttggttaga

SEQ ID NO: 21326 - DNA, 26 bp, Artificial Sequence
  synthetic circulating small noncoding RNA (sncRNA) 5' transfer RNA (tRNA) half
gccgaaacccgggatcgaaccaggga

SEQ ID NO: 21327 - DNA, 17 bp, Artificial Sequence
  synthetic circulating small noncoding RNA (sncRNA) 5' transfer RNA (tRNA) half
aaggcgccagactcaag

SEQ ID NO: 21328 - DNA, 8 bp, Artificial Sequence
  synthetic circulating small noncoding RNA (sncRNA) 5' transfer RNA (tRNA) half
gagcctcc

SEQ ID NO: 21329 - DNA, 18 bp, Artificial Sequence
  synthetic circulating small noncoding RNA (sncRNA) 5' transfer RNA (tRNA) half
tgccgtgactcggattcg

SEQ ID NO: 21330 - DNA, 13 bp, Artificial Sequence
  synthetic circulating small noncoding RNA (sncRNA) 5' transfer RNA (tRNA) half
tcttgcgacccgg

SEQ ID NO: 21331 - DNA, 24 bp, Artificial Sequence
  synthetic circulating small noncoding RNA (sncRNA) 5' transfer RNA (tRNA) half
cagagtactaaccactatacgatc

SEQ ID NO: 21332 - DNA, 22 bp, Artificial Sequence
  synthetic circulating small noncoding RNA (sncRNA) 5' transfer RNA (tRNA) half
agctgtcagaagtgggattcga

SEQ ID NO: 21333 - DNA, 9 bp, Artificial Sequence
  synthetic circulating small noncoding RNA (sncRNA) 5' transfer RNA (tRNA) half
gtcaaatgc

SEQ ID NO: 21334 - DNA, 9 bp, Artificial Sequence
  synthetic circulating small noncoding RNA (sncRNA) 5' transfer RNA (tRNA) half
aaaccgggc

SEQ ID NO: 21335 - DNA, 35 bp, Artificial Sequence
  synthetic circulating small noncoding RNA (sncRNA) 5' transfer RNA (tRNA) half
ccccgtcggggaattgaaccccggtctcccgcgtg

SEQ ID NO: 21336 - DNA, 44 bp, Artificial Sequence
  synthetic circulating small noncoding RNA (sncRNA) 5' transfer RNA (tRNA) half
aaaggcgtccctgggtgggctcgaaccaccaacctttcggttaa

SEQ ID NO: 21337 - DNA, 19 bp, Artificial Sequence
  synthetic circulating small noncoding RNA (sncRNA) 5' transfer RNA (tRNA) half
ggttagcactctggactct

SEQ ID NO: 21338 - DNA, 41 bp, Artificial Sequence
  synthetic circulating small noncoding RNA (sncRNA) 5' transfer RNA (tRNA) half
tgaactcggatcgctggattcagagtccagagtgctaacca

SEQ ID NO: 21339 - DNA, 27 bp, Artificial Sequence
  synthetic circulating small noncoding RNA (sncRNA) 5' transfer RNA (tRNA) half
tccccgtcggggaatcgaaccccggtc

SEQ ID NO: 21340 - DNA, 44 bp, Artificial Sequence
  synthetic circulating small noncoding RNA (sncRNA) 5' transfer RNA (tRNA) half
gtgttcccacaccgggagtcgaacccgggccgcctgggtgaaaa

SEQ ID NO: 21341 - DNA, 22 bp, Artificial Sequence
  synthetic circulating small noncoding RNA (sncRNA) 5' transfer RNA (tRNA) half
ccacaccgggagtcgaacccgg

SEQ ID NO: 21342 - DNA, 26 bp, Artificial Sequence
  synthetic circulating small noncoding RNA (sncRNA) 5' transfer RNA (tRNA) half
tgtagtggttatcacgttcgcctcac

SEQ ID NO: 21343 - DNA, 34 bp, Artificial Sequence
  synthetic circulating small noncoding RNA (sncRNA) 5' transfer RNA (tRNA) half
aggcaccgctggaattcgaacccaggatctcctg

SEQ ID NO: 21344 - DNA, 40 bp, Artificial Sequence
  synthetic circulating small noncoding RNA (sncRNA) 5' transfer RNA (tRNA) half
gatccatcgacctctgggttatgggcccagcacgcttccg

SEQ ID NO: 21345 - DNA, 27 bp, Artificial Sequence
  synthetic circulating small noncoding RNA (sncRNA) 5' transfer RNA (tRNA) half
gtcccaccgagatttgaactcggatcg

SEQ ID NO: 21346 - DNA, 36 bp, Artificial Sequence
  synthetic circulating small noncoding RNA (sncRNA) 5' transfer RNA (tRNA) half
gaaccccggtctcccgcgtgacaggcggggatacta

SEQ ID NO: 21347 - DNA, 23 bp, Artificial Sequence
  synthetic circulating small noncoding RNA (sncRNA) 5' transfer RNA (tRNA) half
ggttcgaaaccgggcagaaacag

SEQ ID NO: 21348 - DNA, 22 bp, Artificial Sequence
  synthetic circulating small noncoding RNA (sncRNA) 5' transfer RNA (tRNA) half
ctgcgttggccgggaatcgaac

SEQ ID NO: 21349 - DNA, 15 bp, Artificial Sequence
  synthetic circulating small noncoding RNA (sncRNA) 5' transfer RNA (tRNA) half
tctcggtgggacctc

SEQ ID NO: 21350 - DNA, 17 bp, Artificial Sequence
  synthetic circulating small noncoding RNA (sncRNA) 5' transfer RNA (tRNA) half
gaagcgtgctgggccca

SEQ ID NO: 21351 - DNA, 18 bp, Artificial Sequence
  synthetic circulating small noncoding RNA (sncRNA) 5' transfer RNA (tRNA) half
ctttgaatccagcgatcc

SEQ ID NO: 21352 - DNA, 15 bp, Artificial Sequence
  synthetic circulating small noncoding RNA (sncRNA) 5' transfer RNA (tRNA) half
agaagattccaggtt

SEQ ID NO: 21353 - DNA, 38 bp, Artificial Sequence
  synthetic circulating small noncoding RNA (sncRNA) 5' transfer RNA (tRNA) half
ccgaaaggttggtggttcgagcccacccagggacgaca

SEQ ID NO: 21354 - DNA, 13 bp, Artificial Sequence
  synthetic circulating small noncoding RNA (sncRNA) 5' transfer RNA (tRNA) half
ctcgcgacccctg

SEQ ID NO: 21355 - DNA, 6 bp, Artificial Sequence
  synthetic circulating small noncoding RNA (sncRNA) 5' transfer RNA (tRNA) half
agtcga

SEQ ID NO: 21356 - DNA, 15 bp, Artificial Sequence
  synthetic circulating small noncoding RNA (sncRNA) 5' transfer RNA (tRNA) half
gttccttcgagccgg

SEQ ID NO: 21357 - DNA, 21 bp, Artificial Sequence
  synthetic circulating small noncoding RNA (sncRNA) 5' transfer RNA (tRNA) half
tagcgacagagtggttcaatt

SEQ ID NO: 21358 - DNA, 15 bp, Artificial Sequence
  synthetic circulating small noncoding RNA (sncRNA) 5' transfer RNA (tRNA) half
agccccacgttgggc

SEQ ID NO: 21359 - DNA, 21 bp, Artificial Sequence
  synthetic circulating small noncoding RNA (sncRNA) 5' transfer RNA (tRNA) half
ctagtggttaggattcggtgc

SEQ ID NO: 21360 - DNA, 33 bp, Artificial Sequence
  synthetic circulating small noncoding RNA (sncRNA) 5' transfer RNA (tRNA) half
ggcccgtacggggatcgaacccgcgaccttggc

SEQ ID NO: 21361 - DNA, 36 bp, Artificial Sequence
  synthetic circulating small noncoding RNA (sncRNA) 5' transfer RNA (tRNA) half
aggatgggattcgaacccacgcgtgcagagcacaat

SEQ ID NO: 21362 - DNA, 21 bp, Artificial Sequence
  synthetic circulating small noncoding RNA (sncRNA) 5' transfer RNA (tRNA) half
tcgatcccactacctctcgca

SEQ ID NO: 21363 - DNA, 9 bp, Artificial Sequence
  synthetic circulating small noncoding RNA (sncRNA) 5' transfer RNA (tRNA) half
ggaatcgaa

SEQ ID NO: 21364 - DNA, 20 bp, Artificial Sequence
  synthetic circulating small noncoding RNA (sncRNA) 5' transfer RNA (tRNA) half
ttccctgaccgggaatcgaa

SEQ ID NO: 21365 - DNA, 27 bp, Artificial Sequence
  synthetic circulating small noncoding RNA (sncRNA) 5' transfer RNA (tRNA) half
atggtgtaatggttagcactctggact

SEQ ID NO: 21366 - DNA, 20 bp, Artificial Sequence
  synthetic circulating small noncoding RNA (sncRNA) 5' transfer RNA (tRNA) half
aaaactgggctcgtccggga

SEQ ID NO: 21367 - DNA, 7 bp, Artificial Sequence
  synthetic circulating small noncoding RNA (sncRNA) 5' transfer RNA (tRNA) half
atgagac

SEQ ID NO: 21368 - DNA, 12 bp, Artificial Sequence
  synthetic circulating small noncoding RNA (sncRNA) 5' transfer RNA (tRNA) half
gcgttggccggg

SEQ ID NO: 21369 - DNA, 25 bp, Artificial Sequence
  synthetic circulating small noncoding RNA (sncRNA) 5' transfer RNA (tRNA) half
gctcagtcggtagagcatgagactc

SEQ ID NO: 21370 - DNA, 7 bp, Artificial Sequence
  synthetic circulating small noncoding RNA (sncRNA) 5' transfer RNA (tRNA) half
gccggga

SEQ ID NO: 21371 - DNA, 36 bp, Artificial Sequence
  synthetic circulating small noncoding RNA (sncRNA) 5' transfer RNA (tRNA) half
aagccagggattgtgggttcgagtcccatctggggt

SEQ ID NO: 21372 - DNA, 33 bp, Artificial Sequence
  synthetic circulating small noncoding RNA (sncRNA) 5' transfer RNA (tRNA) half
ggattaagagtcccatgctctaccgactgagct

SEQ ID NO: 21373 - DNA, 36 bp, Artificial Sequence
  synthetic circulating small noncoding RNA (sncRNA) 5' transfer RNA (tRNA) half
gcatgggtggttcagtggtagaattctcgcctgcca

SEQ ID NO: 21374 - DNA, 22 bp, Artificial Sequence
  synthetic circulating small noncoding RNA (sncRNA) 5' transfer RNA (tRNA) half
aggagttgtgtcagaagtggga

SEQ ID NO: 21375 - DNA, 14 bp, Artificial Sequence
  synthetic circulating small noncoding RNA (sncRNA) 5' transfer RNA (tRNA) half
agcggggccttcga

SEQ ID NO: 21376 - DNA, 14 bp, Artificial Sequence
  synthetic circulating small noncoding RNA (sncRNA) 5' transfer RNA (tRNA) half
aggatttgaacctg

SEQ ID NO: 21377 - DNA, 39 bp, Artificial Sequence
  synthetic circulating small noncoding RNA (sncRNA) 5' transfer RNA (tRNA) half
taagccagggattgtgggttcgagtcccacctggggtgg

SEQ ID NO: 21378 - DNA, 35 bp, Artificial Sequence
  synthetic circulating small noncoding RNA (sncRNA) 5' transfer RNA (tRNA) half
aggagatcctgggttcgaatcccagcggggccttt

SEQ ID NO: 21379 - DNA, 36 bp, Artificial Sequence
  synthetic circulating small noncoding RNA (sncRNA) 5' transfer RNA (tRNA) half
tccagagtgctaaccattacaccatggaaccccctc

SEQ ID NO: 21380 - DNA, 15 bp, Artificial Sequence
  synthetic circulating small noncoding RNA (sncRNA) 5' transfer RNA (tRNA) half
actgagctatccggg

SEQ ID NO: 21381 - DNA, 14 bp, Artificial Sequence
  synthetic circulating small noncoding RNA (sncRNA) 5' transfer RNA (tRNA) half
gagtcccatgctct

SEQ ID NO: 21382 - DNA, 28 bp, Artificial Sequence
  synthetic circulating small noncoding RNA (sncRNA) 5' transfer RNA (tRNA) half
ggtcgagccagccaggagtcgaacctag

SEQ ID NO: 21383 - DNA, 36 bp, Artificial Sequence
  synthetic circulating small noncoding RNA (sncRNA) 5' transfer RNA (tRNA) half
gctggccggttagctcagttggttagagcgtggtgc

SEQ ID NO: 21384 - DNA, 19 bp, Artificial Sequence
  synthetic circulating small noncoding RNA (sncRNA) 5' transfer RNA (tRNA) half
gaggatcgaactcacgacc

SEQ ID NO: 21385 - DNA, 13 bp, Artificial Sequence
  synthetic circulating small noncoding RNA (sncRNA) 5' transfer RNA (tRNA) half
cggggccttcgat

SEQ ID NO: 21386 - DNA, 40 bp, Artificial Sequence
  synthetic circulating small noncoding RNA (sncRNA) 5' transfer RNA (tRNA) half
ggatcagaagattgcaggttcgagtcctgccgcggtcgac

SEQ ID NO: 21387 - DNA, 7 bp, Artificial Sequence
  synthetic circulating small noncoding RNA (sncRNA) 5' transfer RNA (tRNA) half
ggcccgc

SEQ ID NO: 21388 - DNA, 28 bp, Artificial Sequence
  synthetic circulating small noncoding RNA (sncRNA) 5' transfer RNA (tRNA) half
gggtcgcgagttcaaatctcgctggggc

SEQ ID NO: 21389 - DNA, 20 bp, Artificial Sequence
  synthetic circulating small noncoding RNA (sncRNA) 5' transfer RNA (tRNA) half
acgcagcgaccacgaaggga

SEQ ID NO: 21390 - DNA, 25 bp, Artificial Sequence
  synthetic circulating small noncoding RNA (sncRNA) 5' transfer RNA (tRNA) half
aatgctctacccctgagctataccc

SEQ ID NO: 21391 - DNA, 14 bp, Artificial Sequence
  synthetic circulating small noncoding RNA (sncRNA) 5' transfer RNA (tRNA) half
caatgcgctatcca

SEQ ID NO: 21392 - DNA, 29 bp, Artificial Sequence
  synthetic circulating small noncoding RNA (sncRNA) 5' transfer RNA (tRNA) half
agcgacccgagttcaaatctcggtgggac

SEQ ID NO: 21393 - DNA, 17 bp, Artificial Sequence
  synthetic circulating small noncoding RNA (sncRNA) 5' transfer RNA (tRNA) half
agtggcgcagcggaagc

SEQ ID NO: 21394 - DNA, 21 bp, Artificial Sequence
  synthetic circulating small noncoding RNA (sncRNA) 5' transfer RNA (tRNA) half
gcaccatgctctaaccaactg

SEQ ID NO: 21395 - DNA, 22 bp, Artificial Sequence
  synthetic circulating small noncoding RNA (sncRNA) 5' transfer RNA (tRNA) half
gtagtggttatcacatctgctt

SEQ ID NO: 21396 - DNA, 39 bp, Artificial Sequence
  synthetic circulating small noncoding RNA (sncRNA) 5' transfer RNA (tRNA) half
caccgagatttgaactcggatcgctggattcagagtcca

SEQ ID NO: 21397 - DNA, 14 bp, Artificial Sequence
  synthetic circulating small noncoding RNA (sncRNA) 5' transfer RNA (tRNA) half
tgatgctctaccga

SEQ ID NO: 21398 - DNA, 9 bp, Artificial Sequence
  synthetic circulating small noncoding RNA (sncRNA) 5' transfer RNA (tRNA) half
atccgggct

SEQ ID NO: 21399 - DNA, 24 bp, Artificial Sequence
  synthetic circulating small noncoding RNA (sncRNA) 5' transfer RNA (tRNA) half
gccttagaccactcggccacgcta

SEQ ID NO: 21400 - DNA, 31 bp, Artificial Sequence
  synthetic circulating small noncoding RNA (sncRNA) 5' transfer RNA (tRNA) half
ccagccaggagtcgaacctagaatcttctga

SEQ ID NO: 21401 - DNA, 17 bp, Artificial Sequence
  synthetic circulating small noncoding RNA (sncRNA) 5' transfer RNA (tRNA) half
atggataaggcattggc

SEQ ID NO: 21402 - DNA, 21 bp, Artificial Sequence
  synthetic circulating small noncoding RNA (sncRNA) 5' transfer RNA (tRNA) half
ggttcgaatcccaccgctgcc

SEQ ID NO: 21403 - DNA, 34 bp, Artificial Sequence
  synthetic circulating small noncoding RNA (sncRNA) 5' transfer RNA (tRNA) half
gcggccacaacgcagagtactaaccactatacga

SEQ ID NO: 21404 - DNA, 28 bp, Artificial Sequence
  synthetic circulating small noncoding RNA (sncRNA) 5' transfer RNA (tRNA) half
tgcagagtactaaccactatacgatctc

SEQ ID NO: 21405 - DNA, 21 bp, Artificial Sequence
  synthetic circulating small noncoding RNA (sncRNA) 5' transfer RNA (tRNA) half
accgggcggaaacagtactgt

SEQ ID NO: 21406 - DNA, 22 bp, Artificial Sequence
  synthetic circulating small noncoding RNA (sncRNA) 5' transfer RNA (tRNA) half
atccttaggtcgctggttcgaa

SEQ ID NO: 21407 - DNA, 35 bp, Artificial Sequence
  synthetic circulating small noncoding RNA (sncRNA) 5' transfer RNA (tRNA) half
cgccgcggcccgggttcgattcccggtcagggaaa

SEQ ID NO: 21408 - DNA, 6 bp, Artificial Sequence
  synthetic circulating small noncoding RNA (sncRNA) 5' transfer RNA (tRNA) half
tctcgc

SEQ ID NO: 21409 - DNA, 23 bp, Artificial Sequence
  synthetic circulating small noncoding RNA (sncRNA) 5' transfer RNA (tRNA) half
ccgggcctcccgcgtggcaggcg

SEQ ID NO: 21410 - DNA, 11 bp, Artificial Sequence
  synthetic circulating small noncoding RNA (sncRNA) 5' transfer RNA (tRNA) half
gccgagcggtc

SEQ ID NO: 21411 - DNA, 42 bp, Artificial Sequence
  synthetic circulating small noncoding RNA (sncRNA) 5' transfer RNA (tRNA) half
gtggcagcggtgggattcgaacccacgccatcgaaatgactg

SEQ ID NO: 21412 - DNA, 19 bp, Artificial Sequence
  synthetic circulating small noncoding RNA (sncRNA) 5' transfer RNA (tRNA) half
gggatcgaacccggggcct

SEQ ID NO: 21413 - DNA, 19 bp, Artificial Sequence
  synthetic circulating small noncoding RNA (sncRNA) 5' transfer RNA (tRNA) half
tcccggccaatgcactctc

SEQ ID NO: 21414 - DNA, 15 bp, Artificial Sequence
  synthetic circulating small noncoding RNA (sncRNA) 5' transfer RNA (tRNA) half
atcctaaccgctaga

SEQ ID NO: 21415 - DNA, 11 bp, Artificial Sequence
  synthetic circulating small noncoding RNA (sncRNA) 5' transfer RNA (tRNA) half
gcgtgggttcg

SEQ ID NO: 21416 - DNA, 10 bp, Artificial Sequence
  synthetic circulating small noncoding RNA (sncRNA) 5' transfer RNA (tRNA) half
cgagtcacgg

SEQ ID NO: 21417 - DNA, 9 bp, Artificial Sequence
  synthetic circulating small noncoding RNA (sncRNA) 5' transfer RNA (tRNA) half
tcgagccgg

SEQ ID NO: 21418 - DNA, 21 bp, Artificial Sequence
  synthetic circulating small noncoding RNA (sncRNA) 5' transfer RNA (tRNA) half
agaccttataagctacagacg

SEQ ID NO: 21419 - DNA, 23 bp, Artificial Sequence
  synthetic circulating small noncoding RNA (sncRNA) 5' transfer RNA (tRNA) half
tgggtgcgagaggtcccgggttc

SEQ ID NO: 21420 - DNA, 38 bp, Artificial Sequence
  synthetic circulating small noncoding RNA (sncRNA) 5' transfer RNA (tRNA) half
actcggatcgctggattcaaagtccagagtgctaacca

SEQ ID NO: 21421 - DNA, 29 bp, Artificial Sequence
  synthetic circulating small noncoding RNA (sncRNA) 5' transfer RNA (tRNA) half
gtgatcgtataggggttagtactctgcgt

SEQ ID NO: 21422 - DNA, 16 bp, Artificial Sequence
  synthetic circulating small noncoding RNA (sncRNA) 5' transfer RNA (tRNA) half
ctaatggataaggcac

SEQ ID NO: 21423 - DNA, 36 bp, Artificial Sequence
  synthetic circulating small noncoding RNA (sncRNA) 5' transfer RNA (tRNA) half
cgagaggtagcgggatcgatgcccgcatcctccact

SEQ ID NO: 21424 - DNA, 21 bp, Artificial Sequence
  synthetic circulating small noncoding RNA (sncRNA) 5' transfer RNA (tRNA) half
cgtgatcgtatagtggttagt

SEQ ID NO: 21425 - DNA, 20 bp, Artificial Sequence
  synthetic circulating small noncoding RNA (sncRNA) 5' transfer RNA (tRNA) half
gttcgaactcaggaccttca

SEQ ID NO: 21426 - DNA, 35 bp, Artificial Sequence
  synthetic circulating small noncoding RNA (sncRNA) 5' transfer RNA (tRNA) half
ccgaagatcgcgggttcgaaccccgtccgtgcctg

SEQ ID NO: 21427 - DNA, 18 bp, Artificial Sequence
  synthetic circulating small noncoding RNA (sncRNA) 5' transfer RNA (tRNA) half
cgattcccgggcggcgca

SEQ ID NO: 21428 - DNA, 32 bp, Artificial Sequence
  synthetic circulating small noncoding RNA (sncRNA) 5' transfer RNA (tRNA) half
gagaggtccccggttcgaaaccgggcggaaac

SEQ ID NO: 21429 - DNA, 25 bp, Artificial Sequence
  synthetic circulating small noncoding RNA (sncRNA) 5' transfer RNA (tRNA) half
cgtagtcggcaggattcgaacctgc

SEQ ID NO: 21430 - DNA, 22 bp, Artificial Sequence
  synthetic circulating small noncoding RNA (sncRNA) 5' transfer RNA (tRNA) half
actggcccgtacggggatcgaa

SEQ ID NO: 21431 - DNA, 31 bp, Artificial Sequence
  synthetic circulating small noncoding RNA (sncRNA) 5' transfer RNA (tRNA) half
ccctggtagtctagtggttaggattcggtgc

SEQ ID NO: 21432 - DNA, 27 bp, Artificial Sequence
  synthetic circulating small noncoding RNA (sncRNA) 5' transfer RNA (tRNA) half
gtcctgagttcgagcctcagagaaggc

SEQ ID NO: 21433 - DNA, 18 bp, Artificial Sequence
  synthetic circulating small noncoding RNA (sncRNA) 5' transfer RNA (tRNA) half
cttatccattaggccacg

SEQ ID NO: 21434 - DNA, 36 bp, Artificial Sequence
  synthetic circulating small noncoding RNA (sncRNA) 5' transfer RNA (tRNA) half
cccgggccgcggcggtgagagcgccgaatcctaacc

SEQ ID NO: 21435 - DNA, 12 bp, Artificial Sequence
  synthetic circulating small noncoding RNA (sncRNA) 5' transfer RNA (tRNA) half
cccggtgtggga

SEQ ID NO: 21436 - DNA, 24 bp, Artificial Sequence
  synthetic circulating small noncoding RNA (sncRNA) 5' transfer RNA (tRNA) half
tccctgaccgggaatcgaacccgg

SEQ ID NO: 21437 - DNA, 19 bp, Artificial Sequence
  synthetic circulating small noncoding RNA (sncRNA) 5' transfer RNA (tRNA) half
cccagaggtcgatggatcg

SEQ ID NO: 21438 - DNA, 35 bp, Artificial Sequence
  synthetic circulating small noncoding RNA (sncRNA) 5' transfer RNA (tRNA) half
tccctggtggtctagtggctaggattcggcgcttt

SEQ ID NO: 21439 - DNA, 17 bp, Artificial Sequence
  synthetic circulating small noncoding RNA (sncRNA) 5' transfer RNA (tRNA) half
aacccgcgaccttggcg

SEQ ID NO: 21440 - DNA, 27 bp, Artificial Sequence
  synthetic circulating small noncoding RNA (sncRNA) 5' transfer RNA (tRNA) half
tatgaccccgacgtgattcgaacacgc

SEQ ID NO: 21441 - DNA, 13 bp, Artificial Sequence
  synthetic circulating small noncoding RNA (sncRNA) 5' transfer RNA (tRNA) half
gtcgagccagcca

SEQ ID NO: 21442 - DNA, 43 bp, Artificial Sequence
  synthetic circulating small noncoding RNA (sncRNA) 5' transfer RNA (tRNA) half
gtcggcaggattcgaacctgcgcggggaaaccccaatggattt

SEQ ID NO: 21443 - DNA, 16 bp, Artificial Sequence
  synthetic circulating small noncoding RNA (sncRNA) 5' transfer RNA (tRNA) half
acccacgccatcgaaa

SEQ ID NO: 21444 - DNA, 14 bp, Artificial Sequence
  synthetic circulating small noncoding RNA (sncRNA) 5' transfer RNA (tRNA) half
tcggtagagcatca

SEQ ID NO: 21445 - DNA, 30 bp, Artificial Sequence
  synthetic circulating small noncoding RNA (sncRNA) 5' transfer RNA (tRNA) half
agcaacctcggttcgaatccgagtcacggc

SEQ ID NO: 21446 - DNA, 16 bp, Artificial Sequence
  synthetic circulating small noncoding RNA (sncRNA) 5' transfer RNA (tRNA) half
cttcgagccggattcg

SEQ ID NO: 21447 - DNA, 10 bp, Artificial Sequence
  synthetic circulating small noncoding RNA (sncRNA) 5' transfer RNA (tRNA) half
gcaaccatgt

SEQ ID NO: 21448 - DNA, 22 bp, Artificial Sequence
  synthetic circulating small noncoding RNA (sncRNA) 5' transfer RNA (tRNA) half
cgaacccgcgaccttggcgtta

SEQ ID NO: 21449 - DNA, 16 bp, Artificial Sequence
  synthetic circulating small noncoding RNA (sncRNA) 5' transfer RNA (tRNA) half
ttcaaatccgggtgcc

SEQ ID NO: 21450 - DNA, 11 bp, Artificial Sequence
  synthetic circulating small noncoding RNA (sncRNA) 5' transfer RNA (tRNA) half
gctcgaaggac

SEQ ID NO: 21451 - DNA, 25 bp, Artificial Sequence
  synthetic circulating small noncoding RNA (sncRNA) 5' transfer RNA (tRNA) half
agtcaaatgctctacccctgagcta

SEQ ID NO: 21452 - DNA, 14 bp, Artificial Sequence
  synthetic circulating small noncoding RNA (sncRNA) 5' transfer RNA (tRNA) half
acccacgcagacat

SEQ ID NO: 21453 - DNA, 17 bp, Artificial Sequence
  synthetic circulating small noncoding RNA (sncRNA) 5' transfer RNA (tRNA) half
ttagcactctggacttt

SEQ ID NO: 21454 - DNA, 12 bp, Artificial Sequence
  synthetic circulating small noncoding RNA (sncRNA) 5' transfer RNA (tRNA) half
ggttcgagcccc

SEQ ID NO: 21455 - DNA, 6 bp, Artificial Sequence
  synthetic circulating small noncoding RNA (sncRNA) 5' transfer RNA (tRNA) half
tcggct

SEQ ID NO: 21456 - DNA, 19 bp, Artificial Sequence
  synthetic circulating small noncoding RNA (sncRNA) 5' transfer RNA (tRNA) half
atcccacttctgacacagt

SEQ ID NO: 21457 - DNA, 25 bp, Artificial Sequence
  synthetic circulating small noncoding RNA (sncRNA) 5' transfer RNA (tRNA) half
gggttcaatccccggcatctccaac

SEQ ID NO: 21458 - DNA, 45 bp, Artificial Sequence
  synthetic circulating small noncoding RNA (sncRNA) 5' transfer RNA (tRNA) half
cgctggattcagagtccagagtgctaaccattacaccatggaacc

SEQ ID NO: 21459 - DNA, 40 bp, Artificial Sequence
  synthetic circulating small noncoding RNA (sncRNA) 5' transfer RNA (tRNA) half
agtctaacgctctcccaactgagctatttcggcggctgtt

SEQ ID NO: 21460 - DNA, 22 bp, Artificial Sequence
  synthetic circulating small noncoding RNA (sncRNA) 5' transfer RNA (tRNA) half
atgaccccgacgtgatttgaac

SEQ ID NO: 21461 - DNA, 23 bp, Artificial Sequence
  synthetic circulating small noncoding RNA (sncRNA) 5' transfer RNA (tRNA) half
ctccccgcgcaggttcgaatcct

SEQ ID NO: 21462 - DNA, 38 bp, Artificial Sequence
  synthetic circulating small noncoding RNA (sncRNA) 5' transfer RNA (tRNA) half
ttgaccccgacgtgacttgaacacgcaaccttctgatc

SEQ ID NO: 21463 - DNA, 16 bp, Artificial Sequence
  synthetic circulating small noncoding RNA (sncRNA) 5' transfer RNA (tRNA) half
gcagcgccttagaccg

SEQ ID NO: 21464 - DNA, 20 bp, Artificial Sequence
  synthetic circulating small noncoding RNA (sncRNA) 5' transfer RNA (tRNA) half
gtatagtggttagtactctg

SEQ ID NO: 21465 - DNA, 33 bp, Artificial Sequence
  synthetic circulating small noncoding RNA (sncRNA) 5' transfer RNA (tRNA) half
gcatgaggtcctgggttcgatccccagcatctc

SEQ ID NO: 21466 - DNA, 27 bp, Artificial Sequence
  synthetic circulating small noncoding RNA (sncRNA) 5' transfer RNA (tRNA) half
gccgaaacccgggatcgaaccagggac

SEQ ID NO: 21467 - DNA, 13 bp, Artificial Sequence
  synthetic circulating small noncoding RNA (sncRNA) 5' transfer RNA (tRNA) half
ctccgccgggact

SEQ ID NO: 21468 - DNA, 21 bp, Artificial Sequence
  synthetic circulating small noncoding RNA (sncRNA) 5' transfer RNA (tRNA) half
tctcggtgggacctctttgaa

SEQ ID NO: 21469 - DNA, 31 bp, Artificial Sequence
  synthetic circulating small noncoding RNA (sncRNA) 5' transfer RNA (tRNA) half
taaaggtccctggttcgatcccgggtttcgg

SEQ ID NO: 21470 - DNA, 10 bp, Artificial Sequence
  synthetic circulating small noncoding RNA (sncRNA) 5' transfer RNA (tRNA) half
cggaagcgtg

SEQ ID NO: 21471 - DNA, 15 bp, Artificial Sequence
  synthetic circulating small noncoding RNA (sncRNA) 5' transfer RNA (tRNA) half
attccccgacgggga

SEQ ID NO: 21472 - DNA, 22 bp, Artificial Sequence
  synthetic circulating small noncoding RNA (sncRNA) 5' transfer RNA (tRNA) half
ctcgaaggagtagcctgtcttt

SEQ ID NO: 21473 - DNA, 35 bp, Artificial Sequence
  synthetic circulating small noncoding RNA (sncRNA) 5' transfer RNA (tRNA) half
caaggtcgcgggttcgatccccgtacgggccacat

SEQ ID NO: 21474 - DNA, 21 bp, Artificial Sequence
  synthetic circulating small noncoding RNA (sncRNA) 5' transfer RNA (tRNA) half
tcgatgcccgcattctccata

SEQ ID NO: 21475 - DNA, 33 bp, Artificial Sequence
  synthetic circulating small noncoding RNA (sncRNA) 5' transfer RNA (tRNA) half
cgtcggggaatcgaaccccggtctcccgcgtga

SEQ ID NO: 21476 - DNA, 26 bp, Artificial Sequence
  synthetic circulating small noncoding RNA (sncRNA) 5' transfer RNA (tRNA) half
ctccttcgagccggattcgaaccagc

SEQ ID NO: 21477 - DNA, 15 bp, Artificial Sequence
  synthetic circulating small noncoding RNA (sncRNA) 5' transfer RNA (tRNA) half
agagtccagagtgct

SEQ ID NO: 21478 - DNA, 44 bp, Artificial Sequence
  synthetic circulating small noncoding RNA (sncRNA) 5' transfer RNA (tRNA) half
gggagtcgaacccgggccgcctgggtgaaaaccaggaatcctaa

SEQ ID NO: 21479 - DNA, 18 bp, Artificial Sequence
  synthetic circulating small noncoding RNA (sncRNA) 5' transfer RNA (tRNA) half
ccgggcgactgtcacttc

SEQ ID NO: 21480 - DNA, 22 bp, Artificial Sequence
  synthetic circulating small noncoding RNA (sncRNA) 5' transfer RNA (tRNA) half
ggttcgatcccgggtttcggca

SEQ ID NO: 21481 - DNA, 16 bp, Artificial Sequence
  synthetic circulating small noncoding RNA (sncRNA) 5' transfer RNA (tRNA) half
tatgattctcgcttag

SEQ ID NO: 21482 - DNA, 14 bp, Artificial Sequence
  synthetic circulating small noncoding RNA (sncRNA) 5' transfer RNA (tRNA) half
ggttccatagtgta

SEQ ID NO: 21483 - DNA, 15 bp, Artificial Sequence
  synthetic circulating small noncoding RNA (sncRNA) 5' transfer RNA (tRNA) half
actgagctagccggg

SEQ ID NO: 21484 - DNA, 33 bp, Artificial Sequence
  synthetic circulating small noncoding RNA (sncRNA) 5' transfer RNA (tRNA) half
gcccaacgtggggctcgaacccacgaccctggg

SEQ ID NO: 21485 - DNA, 29 bp, Artificial Sequence
  synthetic circulating small noncoding RNA (sncRNA) 5' transfer RNA (tRNA) half
aatgctccaggtgaggctcgaactcacaa

SEQ ID NO: 21486 - DNA, 27 bp, Artificial Sequence
  synthetic circulating small noncoding RNA (sncRNA) 5' transfer RNA (tRNA) half
tagtggtgagtatccccgcctgtcacg

SEQ ID NO: 21487 - DNA, 20 bp, Artificial Sequence
  synthetic circulating small noncoding RNA (sncRNA) 5' transfer RNA (tRNA) half
tgtggcccgtacggggatcg

SEQ ID NO: 21488 - DNA, 13 bp, Artificial Sequence
  synthetic circulating small noncoding RNA (sncRNA) 5' transfer RNA (tRNA) half
tgcagtcaaatgc

SEQ ID NO: 21489 - DNA, 18 bp, Artificial Sequence
  synthetic circulating small noncoding RNA (sncRNA) 5' transfer RNA (tRNA) half
tccgcccggtttcgaacc

SEQ ID NO: 21490 - DNA, 28 bp, Artificial Sequence
  synthetic circulating small noncoding RNA (sncRNA) 5' transfer RNA (tRNA) half
gtccaatgcgctatccattgcgccacag

SEQ ID NO: 21491 - DNA, 25 bp, Artificial Sequence
  synthetic circulating small noncoding RNA (sncRNA) 5' transfer RNA (tRNA) half
aatgttccgactccgccgggactcg

SEQ ID NO: 21492 - DNA, 12 bp, Artificial Sequence
  synthetic circulating small noncoding RNA (sncRNA) 5' transfer RNA (tRNA) half
tgccgactacgt

SEQ ID NO: 21493 - DNA, 12 bp, Artificial Sequence
  synthetic circulating small noncoding RNA (sncRNA) 5' transfer RNA (tRNA) half
tcgaatccgagt

SEQ ID NO: 21494 - DNA, 25 bp, Artificial Sequence
  synthetic circulating small noncoding RNA (sncRNA) 5' transfer RNA (tRNA) half
ttgaactcggatcgctggattcaga

SEQ ID NO: 21495 - DNA, 26 bp, Artificial Sequence
  synthetic circulating small noncoding RNA (sncRNA) 5' transfer RNA (tRNA) half
gtctagtggttaggattcggcgctct

SEQ ID NO: 21496 - DNA, 22 bp, Artificial Sequence
  synthetic circulating small noncoding RNA (sncRNA) 5' transfer RNA (tRNA) half
ggatttgaaccagggacctctt

SEQ ID NO: 21497 - DNA, 31 bp, Artificial Sequence
  synthetic circulating small noncoding RNA (sncRNA) 5' transfer RNA (tRNA) half
atgattctcgctttgggtgcgagaggtcccg

SEQ ID NO: 21498 - DNA, 21 bp, Artificial Sequence
  synthetic circulating small noncoding RNA (sncRNA) 5' transfer RNA (tRNA) half
acagtagcgcccgaacaggga

SEQ ID NO: 21499 - DNA, 43 bp, Artificial Sequence
  synthetic circulating small noncoding RNA (sncRNA) 5' transfer RNA (tRNA) half
cctgagattaagagtctcatgctctaccgactgagctagccgg

SEQ ID NO: 21500 - DNA, 19 bp, Artificial Sequence
  synthetic circulating small noncoding RNA (sncRNA) 5' transfer RNA (tRNA) half
ggtctaaggcgctgcgttc

SEQ ID NO: 21501 - DNA, 22 bp, Artificial Sequence
  synthetic circulating small noncoding RNA (sncRNA) 5' transfer RNA (tRNA) half
tcaatcttctgatccggaatca

SEQ ID NO: 21502 - DNA, 24 bp, Artificial Sequence
  synthetic circulating small noncoding RNA (sncRNA) 5' transfer RNA (tRNA) half
gtttcgatccatcgacctctgggt

SEQ ID NO: 21503 - DNA, 17 bp, Artificial Sequence
  synthetic circulating small noncoding RNA (sncRNA) 5' transfer RNA (tRNA) half
gtctagtggttaggatt

SEQ ID NO: 21504 - DNA, 28 bp, Artificial Sequence
  synthetic circulating small noncoding RNA (sncRNA) 5' transfer RNA (tRNA) half
ctgtagtgtagtggttatcacgctcgcc

SEQ ID NO: 21505 - DNA, 34 bp, Artificial Sequence
  synthetic circulating small noncoding RNA (sncRNA) 5' transfer RNA (tRNA) half
ggccggttagctcagttggttagagtgtggtgct

SEQ ID NO: 21506 - DNA, 14 bp, Artificial Sequence
  synthetic circulating small noncoding RNA (sncRNA) 5' transfer RNA (tRNA) half
cccgggccgcggcg

SEQ ID NO: 21507 - DNA, 25 bp, Artificial Sequence
  synthetic circulating small noncoding RNA (sncRNA) 5' transfer RNA (tRNA) half
gattcagagtccagagtgctaacca

SEQ ID NO: 21508 - DNA, 45 bp, Artificial Sequence
  synthetic circulating small noncoding RNA (sncRNA) 5' transfer RNA (tRNA) half
ccgcccaacgtggggctcgaacccacgaccctgggattaagagtc

SEQ ID NO: 21509 - DNA, 29 bp, Artificial Sequence
  synthetic circulating small noncoding RNA (sncRNA) 5' transfer RNA (tRNA) half
gttaggcgaatgtgataaccactacacta

SEQ ID NO: 21510 - DNA, 22 bp, Artificial Sequence
  synthetic circulating small noncoding RNA (sncRNA) 5' transfer RNA (tRNA) half
cgaacccacgcctccattcgga

SEQ ID NO: 21511 - DNA, 33 bp, Artificial Sequence
  synthetic circulating small noncoding RNA (sncRNA) 5' transfer RNA (tRNA) half
ggcttccctgaccgggaatcgaacccgggccgc

SEQ ID NO: 21512 - DNA, 26 bp, Artificial Sequence
  synthetic circulating small noncoding RNA (sncRNA) 5' transfer RNA (tRNA) half
ccagagtgctagccattacaccatgg

SEQ ID NO: 21513 - DNA, 31 bp, Artificial Sequence
  synthetic circulating small noncoding RNA (sncRNA) 5' transfer RNA (tRNA) half
gagtccagagtgctaaccattacaccatgga

SEQ ID NO: 21514 - DNA, 29 bp, Artificial Sequence
  synthetic circulating small noncoding RNA (sncRNA) 5' transfer RNA (tRNA) half
gtcagaagtgggattcgaacccacgcctc

SEQ ID NO: 21515 - DNA, 25 bp, Artificial Sequence
  synthetic circulating small noncoding RNA (sncRNA) 5' transfer RNA (tRNA) half
gaggtccccggttcaaatccgggtg

SEQ ID NO: 21516 - DNA, 36 bp, Artificial Sequence
  synthetic circulating small noncoding RNA (sncRNA) 5' transfer RNA (tRNA) half
cgctggattcagagtccagagtgctaaccattacac

SEQ ID NO: 21517 - DNA, 18 bp, Artificial Sequence
  synthetic circulating small noncoding RNA (sncRNA) 5' transfer RNA (tRNA) half
tggttatcacgttcgcct

SEQ ID NO: 21518 - DNA, 20 bp, Artificial Sequence
  synthetic circulating small noncoding RNA (sncRNA) 5' transfer RNA (tRNA) half
caaatcccggacgagcccag

SEQ ID NO: 21519 - DNA, 21 bp, Artificial Sequence
  synthetic circulating small noncoding RNA (sncRNA) 5' transfer RNA (tRNA) half
ctccttcgagccggattcgaa

SEQ ID NO: 21520 - DNA, 22 bp, Artificial Sequence
  synthetic circulating small noncoding RNA (sncRNA) 5' transfer RNA (tRNA) half
gcattggccgggaatcgaaccc

SEQ ID NO: 21521 - DNA, 21 bp, Artificial Sequence
  synthetic circulating small noncoding RNA (sncRNA) 5' transfer RNA (tRNA) half
actgcagatcaagaggtcccc

SEQ ID NO: 21522 - DNA, 13 bp, Artificial Sequence
  synthetic circulating small noncoding RNA (sncRNA) 5' transfer RNA (tRNA) half
ctcgcacccaaag

SEQ ID NO: 21523 - DNA, 36 bp, Artificial Sequence
  synthetic circulating small noncoding RNA (sncRNA) 5' transfer RNA (tRNA) half
cattcttgcgacccgggttcgattcccgggcggcgc

SEQ ID NO: 21524 - DNA, 41 bp, Artificial Sequence
  synthetic circulating small noncoding RNA (sncRNA) 5' transfer RNA (tRNA) half
gaacccacgaccctgagattaagagtctcatgctctaccga

SEQ ID NO: 21525 - DNA, 29 bp, Artificial Sequence
  synthetic circulating small noncoding RNA (sncRNA) 5' transfer RNA (tRNA) half
gtggtagaattctcgcctgccacgcggga

SEQ ID NO: 21526 - DNA, 19 bp, Artificial Sequence
  synthetic circulating small noncoding RNA (sncRNA) 5' transfer RNA (tRNA) half
gttaggattcggcgctctc

SEQ ID NO: 21527 - DNA, 19 bp, Artificial Sequence
  synthetic circulating small noncoding RNA (sncRNA) 5' transfer RNA (tRNA) half
tagtggtgagtatccccgc

SEQ ID NO: 21528 - DNA, 16 bp, Artificial Sequence
  synthetic circulating small noncoding RNA (sncRNA) 5' transfer RNA (tRNA) half
tcgattccccgacggg

SEQ ID NO: 21529 - DNA, 17 bp, Artificial Sequence
  synthetic circulating small noncoding RNA (sncRNA) 5' transfer RNA (tRNA) half
tagtggtatgattctca

SEQ ID NO: 21530 - DNA, 34 bp, Artificial Sequence
  synthetic circulating small noncoding RNA (sncRNA) 5' transfer RNA (tRNA) half
gcagtcaaatgctctacccctgagctataccccc

SEQ ID NO: 21531 - DNA, 15 bp, Artificial Sequence
  synthetic circulating small noncoding RNA (sncRNA) 5' transfer RNA (tRNA) half
ttctgggttcgagtc

SEQ ID NO: 21532 - DNA, 22 bp, Artificial Sequence
  synthetic circulating small noncoding RNA (sncRNA) 5' transfer RNA (tRNA) half
tccggctcgaaggagacagtaa

SEQ ID NO: 21533 - DNA, 17 bp, Artificial Sequence
  synthetic circulating small noncoding RNA (sncRNA) 5' transfer RNA (tRNA) half
tcccataccgggagtcg

SEQ ID NO: 21534 - DNA, 22 bp, Artificial Sequence
  synthetic circulating small noncoding RNA (sncRNA) 5' transfer RNA (tRNA) half
ctcccctggaggcgtgggttcg

SEQ ID NO: 21535 - DNA, 17 bp, Artificial Sequence
  synthetic circulating small noncoding RNA (sncRNA) 5' transfer RNA (tRNA) half
cgaatcctaaccactag

SEQ ID NO: 21536 - DNA, 23 bp, Artificial Sequence
  synthetic circulating small noncoding RNA (sncRNA) 5' transfer RNA (tRNA) half
cgggttcgatccccgtacgggcc

SEQ ID NO: 21537 - DNA, 11 bp, Artificial Sequence
  synthetic circulating small noncoding RNA (sncRNA) 5' transfer RNA (tRNA) half
cctcggttcga

SEQ ID NO: 21538 - DNA, 18 bp, Artificial Sequence
  synthetic circulating small noncoding RNA (sncRNA) 5' transfer RNA (tRNA) half
agccgcccgaacagggac

SEQ ID NO: 21539 - DNA, 21 bp, Artificial Sequence
  synthetic circulating small noncoding RNA (sncRNA) 5' transfer RNA (tRNA) half
aaacactggcagtggtgggat

SEQ ID NO: 21540 - DNA, 9 bp, Artificial Sequence
  synthetic circulating small noncoding RNA (sncRNA) 5' transfer RNA (tRNA) half
ccgccggga

SEQ ID NO: 21541 - DNA, 7 bp, Artificial Sequence
  synthetic circulating small noncoding RNA (sncRNA) 5' transfer RNA (tRNA) half
cggagcc

SEQ ID NO: 21542 - DNA, 35 bp, Artificial Sequence
  synthetic circulating small noncoding RNA (sncRNA) 5' transfer RNA (tRNA) half
gtttccgtagtgtagtggtcatcacgctcgcctca

SEQ ID NO: 21543 - DNA, 10 bp, Artificial Sequence
  synthetic circulating small noncoding RNA (sncRNA) 5' transfer RNA (tRNA) half
ggtctggccg

SEQ ID NO: 21544 - DNA, 11 bp, Artificial Sequence
  synthetic circulating small noncoding RNA (sncRNA) 5' transfer RNA (tRNA) half
cgtacgggcca

SEQ ID NO: 21545 - DNA, 20 bp, Artificial Sequence
  synthetic circulating small noncoding RNA (sncRNA) 5' transfer RNA (tRNA) half
agtccagatagcagaggatg

SEQ ID NO: 21546 - DNA, 18 bp, Artificial Sequence
  synthetic circulating small noncoding RNA (sncRNA) 5' transfer RNA (tRNA) half
agaccggggttcgattcc

SEQ ID NO: 21547 - DNA, 14 bp, Artificial Sequence
  synthetic circulating small noncoding RNA (sncRNA) 5' transfer RNA (tRNA) half
ttccttcgagccgg

SEQ ID NO: 21548 - DNA, 43 bp, Artificial Sequence
  synthetic circulating small noncoding RNA (sncRNA) 5' transfer RNA (tRNA) half
cctccgatagcagaggatggtttcgatccatcgacctctgggt

SEQ ID NO: 21549 - DNA, 22 bp, Artificial Sequence
  synthetic circulating small noncoding RNA (sncRNA) 5' transfer RNA (tRNA) half
ctccttcgagccggattcgaac

SEQ ID NO: 21550 - DNA, 22 bp, Artificial Sequence
  synthetic circulating small noncoding RNA (sncRNA) 5' transfer RNA (tRNA) half
ctctgaatccagcgatccgagt

SEQ ID NO: 21551 - DNA, 21 bp, Artificial Sequence
  synthetic circulating small noncoding RNA (sncRNA) 5' transfer RNA (tRNA) half
gtccagtgtgctaaccattac

SEQ ID NO: 21552 - DNA, 39 bp, Artificial Sequence
  synthetic circulating small noncoding RNA (sncRNA) 5' transfer RNA (tRNA) half
ccccgacgtgattcgaacacgcagccttctgatctggag

SEQ ID NO: 21553 - DNA, 24 bp, Artificial Sequence
  synthetic circulating small noncoding RNA (sncRNA) 5' transfer RNA (tRNA) half
tggttcgattccggctcgaaggac

SEQ ID NO: 21554 - DNA, 30 bp, Artificial Sequence
  synthetic circulating small noncoding RNA (sncRNA) 5' transfer RNA (tRNA) half
gctcgttggtctaggggtatgattctcggt

SEQ ID NO: 21555 - DNA, 17 bp, Artificial Sequence
  synthetic circulating small noncoding RNA (sncRNA) 5' transfer RNA (tRNA) half
ctggagcacttcttttt

SEQ ID NO: 21556 - DNA, 17 bp, Artificial Sequence
  synthetic circulating small noncoding RNA (sncRNA) 5' transfer RNA (tRNA) half
aggtccctggttcgatc

SEQ ID NO: 21557 - DNA, 17 bp, Artificial Sequence
  synthetic circulating small noncoding RNA (sncRNA) 5' transfer RNA (tRNA) half
agaccggggttcgattc

SEQ ID NO: 21558 - DNA, 23 bp, Artificial Sequence
  synthetic circulating small noncoding RNA (sncRNA) 5' transfer RNA (tRNA) half
agttcaaatctcggtgggacctc

SEQ ID NO: 21559 - DNA, 31 bp, Artificial Sequence
  synthetic circulating small noncoding RNA (sncRNA) 5' transfer RNA (tRNA) half
cgatccgagttcaaatctcggtggaacctac

SEQ ID NO: 21560 - DNA, 9 bp, Artificial Sequence
  synthetic circulating small noncoding RNA (sncRNA) 5' transfer RNA (tRNA) half
cacctggat

SEQ ID NO: 21561 - DNA, 17 bp, Artificial Sequence
  synthetic circulating small noncoding RNA (sncRNA) 5' transfer RNA (tRNA) half
gagaggtcccaccgaga

SEQ ID NO: 21562 - DNA, 11 bp, Artificial Sequence
  synthetic circulating small noncoding RNA (sncRNA) 5' transfer RNA (tRNA) half
cggttagctca

SEQ ID NO: 21563 - DNA, 20 bp, Artificial Sequence
  synthetic circulating small noncoding RNA (sncRNA) 5' transfer RNA (tRNA) half
cttccgctgcgccactctgc

SEQ ID NO: 21564 - DNA, 30 bp, Artificial Sequence
  synthetic circulating small noncoding RNA (sncRNA) 5' transfer RNA (tRNA) half
ggggatgtagctcagtggtagagcacatgc

SEQ ID NO: 21565 - DNA, 18 bp, Artificial Sequence
  synthetic circulating small noncoding RNA (sncRNA) 5' transfer RNA (tRNA) half
cgattcccggcccatgca

SEQ ID NO: 21566 - DNA, 27 bp, Artificial Sequence
  synthetic circulating small noncoding RNA (sncRNA) 5' transfer RNA (tRNA) half
ttagcactctggactctgaatccagcg

SEQ ID NO: 21567 - DNA, 28 bp, Artificial Sequence
  synthetic circulating small noncoding RNA (sncRNA) 5' transfer RNA (tRNA) half
caggcggcccgggttcgactcccggtat

SEQ ID NO: 21568 - DNA, 28 bp, Artificial Sequence
  synthetic circulating small noncoding RNA (sncRNA) 5' transfer RNA (tRNA) half
cataacccagaggtcgatggatcgaaac

SEQ ID NO: 21569 - DNA, 25 bp, Artificial Sequence
  synthetic circulating small noncoding RNA (sncRNA) 5' transfer RNA (tRNA) half
cagtggtagaattctcgcctgccac

SEQ ID NO: 21570 - DNA, 29 bp, Artificial Sequence
  synthetic circulating small noncoding RNA (sncRNA) 5' transfer RNA (tRNA) half
agcgcccgaacagggacttgaaccctgga

SEQ ID NO: 21571 - DNA, 16 bp, Artificial Sequence
  synthetic circulating small noncoding RNA (sncRNA) 5' transfer RNA (tRNA) half
gaacccgcgaccttgg

SEQ ID NO: 21572 - DNA, 30 bp, Artificial Sequence
  synthetic circulating small noncoding RNA (sncRNA) 5' transfer RNA (tRNA) half
gatagctcagtcggtagagcatcagacttt

SEQ ID NO: 21573 - DNA, 19 bp, Artificial Sequence
  synthetic circulating small noncoding RNA (sncRNA) 5' transfer RNA (tRNA) half
tcggttcccggccaatgca

SEQ ID NO: 21574 - DNA, 32 bp, Artificial Sequence
  synthetic circulating small noncoding RNA (sncRNA) 5' transfer RNA (tRNA) half
ggtggagatgccggggatcgaacccggggcct

SEQ ID NO: 21575 - DNA, 29 bp, Artificial Sequence
  synthetic circulating small noncoding RNA (sncRNA) 5' transfer RNA (tRNA) half
gagatcctgggttcgaatcccagcggggc

SEQ ID NO: 21576 - DNA, 16 bp, Artificial Sequence
  synthetic circulating small noncoding RNA (sncRNA) 5' transfer RNA (tRNA) half
cgaaaccgggcggaaa

SEQ ID NO: 21577 - DNA, 34 bp, Artificial Sequence
  synthetic circulating small noncoding RNA (sncRNA) 5' transfer RNA (tRNA) half
aggagatcctgggttcgaatcccagcggggcctt

SEQ ID NO: 21578 - DNA, 41 bp, Artificial Sequence
  synthetic circulating small noncoding RNA (sncRNA) 5' transfer RNA (tRNA) half
cagtctcttcgggggcgtgggttcgaatcccaccgctgcca

SEQ ID NO: 21579 - DNA, 13 bp, Artificial Sequence
  synthetic circulating small noncoding RNA (sncRNA) 5' transfer RNA (tRNA) half
cccccgaccgctc

SEQ ID NO: 21580 - DNA, 14 bp, Artificial Sequence
  synthetic circulating small noncoding RNA (sncRNA) 5' transfer RNA (tRNA) half
gcggaagcgtgctg

SEQ ID NO: 21581 - DNA, 34 bp, Artificial Sequence
  synthetic circulating small noncoding RNA (sncRNA) 5' transfer RNA (tRNA) half
ccagccaggagtcgaacctggaatcttctgatcc

SEQ ID NO: 21582 - DNA, 16 bp, Artificial Sequence
  synthetic circulating small noncoding RNA (sncRNA) 5' transfer RNA (tRNA) half
attgcattggccggga

SEQ ID NO: 21583 - DNA, 37 bp, Artificial Sequence
  synthetic circulating small noncoding RNA (sncRNA) 5' transfer RNA (tRNA) half
gcgtccctgggtgggctcgaaccaccaacctttcggt

SEQ ID NO: 21584 - DNA, 12 bp, Artificial Sequence
  synthetic circulating small noncoding RNA (sncRNA) 5' transfer RNA (tRNA) half
gcccgggttcgg

SEQ ID NO: 21585 - DNA, 28 bp, Artificial Sequence
  synthetic circulating small noncoding RNA (sncRNA) 5' transfer RNA (tRNA) half
actcggattcgaaccgaggttgctgcgg

SEQ ID NO: 21586 - DNA, 12 bp, Artificial Sequence
  synthetic circulating small noncoding RNA (sncRNA) 5' transfer RNA (tRNA) half
aaccagcgacct

SEQ ID NO: 21587 - DNA, 27 bp, Artificial Sequence
  synthetic circulating small noncoding RNA (sncRNA) 5' transfer RNA (tRNA) half
acccacgaccctgggattaagagtccc

SEQ ID NO: 21588 - DNA, 34 bp, Artificial Sequence
  synthetic circulating small noncoding RNA (sncRNA) 5' transfer RNA (tRNA) half
aagacttaaaaccttgttcccagaggttcaaatc

SEQ ID NO: 21589 - DNA, 26 bp, Artificial Sequence
  synthetic circulating small noncoding RNA (sncRNA) 5' transfer RNA (tRNA) half
ggccttgctgggattcgaacccagga

SEQ ID NO: 21590 - DNA, 18 bp, Artificial Sequence
  synthetic circulating small noncoding RNA (sncRNA) 5' transfer RNA (tRNA) half
tctaaggcgctggattaa

SEQ ID NO: 21591 - DNA, 23 bp, Artificial Sequence
  synthetic circulating small noncoding RNA (sncRNA) 5' transfer RNA (tRNA) half
tcagtctaacgctctcccaactg

SEQ ID NO: 21592 - DNA, 17 bp, Artificial Sequence
  synthetic circulating small noncoding RNA (sncRNA) 5' transfer RNA (tRNA) half
gttcgactcccggtatg

SEQ ID NO: 21593 - DNA, 12 bp, Artificial Sequence
  synthetic circulating small noncoding RNA (sncRNA) 5' transfer RNA (tRNA) half
tacactacggaa

SEQ ID NO: 21594 - DNA, 18 bp, Artificial Sequence
  synthetic circulating small noncoding RNA (sncRNA) 5' transfer RNA (tRNA) half
gttcgattcccggcatct

SEQ ID NO: 21595 - DNA, 20 bp, Artificial Sequence
  synthetic circulating small noncoding RNA (sncRNA) 5' transfer RNA (tRNA) half
agaccggggttcgattcccc

SEQ ID NO: 21596 - DNA, 29 bp, Artificial Sequence
  synthetic circulating small noncoding RNA (sncRNA) 5' transfer RNA (tRNA) half
gccccagtggcctaatggataaggcattg

SEQ ID NO: 21597 - DNA, 18 bp, Artificial Sequence
  synthetic circulating small noncoding RNA (sncRNA) 5' transfer RNA (tRNA) half
aaatgttcccgcccggtt

SEQ ID NO: 21598 - DNA, 41 bp, Artificial Sequence
  synthetic circulating small noncoding RNA (sncRNA) 5' transfer RNA (tRNA) half
accggggacctttcgcgtgtgaggcgaacgtgataaccact

SEQ ID NO: 21599 - DNA, 44 bp, Artificial Sequence
  synthetic circulating small noncoding RNA (sncRNA) 5' transfer RNA (tRNA) half
aaccggggacctttcgcgtgtgaggcgaacgtgataaccactac

SEQ ID NO: 21600 - DNA, 41 bp, Artificial Sequence
  synthetic circulating small noncoding RNA (sncRNA) 5' transfer RNA (tRNA) half
gcggtgagagcgccgaatcctaaccactagaccaccaggga

SEQ ID NO: 21601 - DNA, 30 bp, Artificial Sequence
  synthetic circulating small noncoding RNA (sncRNA) 5' transfer RNA (tRNA) half
cagattaaaagtctgatgctctaccgactg

SEQ ID NO: 21602 - DNA, 24 bp, Artificial Sequence
  synthetic circulating small noncoding RNA (sncRNA) 5' transfer RNA (tRNA) half
gtcaaatgctctaccactgagcta

SEQ ID NO: 21603 - DNA, 37 bp, Artificial Sequence
  synthetic circulating small noncoding RNA (sncRNA) 5' transfer RNA (tRNA) half
ccgggccgcggcggtgagagcgccgaatcctaaccac

SEQ ID NO: 21604 - DNA, 7 bp, Artificial Sequence
  synthetic circulating small noncoding RNA (sncRNA) 5' transfer RNA (tRNA) half
gagccga

SEQ ID NO: 21605 - DNA, 23 bp, Artificial Sequence
  synthetic circulating small noncoding RNA (sncRNA) 5' transfer RNA (tRNA) half
aaagacctgtacattccgagcca

SEQ ID NO: 21606 - DNA, 16 bp, Artificial Sequence
  synthetic circulating small noncoding RNA (sncRNA) 5' transfer RNA (tRNA) half
ggtcgtgggttcgagc

SEQ ID NO: 21607 - DNA, 36 bp, Artificial Sequence
  synthetic circulating small noncoding RNA (sncRNA) 5' transfer RNA (tRNA) half
aggttgctgcggccacaacgcagagtactaaccact

SEQ ID NO: 21608 - DNA, 20 bp, Artificial Sequence
  synthetic circulating small noncoding RNA (sncRNA) 5' transfer RNA (tRNA) half
gagggggcacccggatttga

SEQ ID NO: 21609 - DNA, 29 bp, Artificial Sequence
  synthetic circulating small noncoding RNA (sncRNA) 5' transfer RNA (tRNA) half
ggcccgggttcgactcccggtgtgggaac

SEQ ID NO: 21610 - DNA, 13 bp, Artificial Sequence
  synthetic circulating small noncoding RNA (sncRNA) 5' transfer RNA (tRNA) half
cacgggttcgaac

SEQ ID NO: 21611 - DNA, 32 bp, Artificial Sequence
  synthetic circulating small noncoding RNA (sncRNA) 5' transfer RNA (tRNA) half
agccaggtaggagtcgaacctacaatcttctg

SEQ ID NO: 21612 - DNA, 32 bp, Artificial Sequence
  synthetic circulating small noncoding RNA (sncRNA) 5' transfer RNA (tRNA) half
gagaatcatacccctagaccaacgagccgctc

SEQ ID NO: 21613 - DNA, 10 bp, Artificial Sequence
  synthetic circulating small noncoding RNA (sncRNA) 5' transfer RNA (tRNA) half
gtgtttccgc

SEQ ID NO: 21614 - DNA, 13 bp, Artificial Sequence
  synthetic circulating small noncoding RNA (sncRNA) 5' transfer RNA (tRNA) half
ggataaggcactg

SEQ ID NO: 21615 - DNA, 17 bp, Artificial Sequence
  synthetic circulating small noncoding RNA (sncRNA) 5' transfer RNA (tRNA) half
tgaccccgacgtgattt

SEQ ID NO: 21616 - DNA, 15 bp, Artificial Sequence
  synthetic circulating small noncoding RNA (sncRNA) 5' transfer RNA (tRNA) half
ctcaaatggtagagc

SEQ ID NO: 21617 - DNA, 18 bp, Artificial Sequence
  synthetic circulating small noncoding RNA (sncRNA) 5' transfer RNA (tRNA) half
gtgagggggcacccggat

SEQ ID NO: 21618 - DNA, 19 bp, Artificial Sequence
  synthetic circulating small noncoding RNA (sncRNA) 5' transfer RNA (tRNA) half
tccttcgagccggattcga

SEQ ID NO: 21619 - DNA, 10 bp, Artificial Sequence
  synthetic circulating small noncoding RNA (sncRNA) 5' transfer RNA (tRNA) half
gatccgtagt

SEQ ID NO: 21620 - DNA, 27 bp, Artificial Sequence
  synthetic circulating small noncoding RNA (sncRNA) 5' transfer RNA (tRNA) half
attaagagtcccatgctctaccgactg

SEQ ID NO: 21621 - DNA, 26 bp, Artificial Sequence
  synthetic circulating small noncoding RNA (sncRNA) 5' transfer RNA (tRNA) half
ccgcctgtcacgcgggagaccggggt

SEQ ID NO: 21622 - DNA, 9 bp, Artificial Sequence
  synthetic circulating small noncoding RNA (sncRNA) 5' transfer RNA (tRNA) half
cgcgggttc

SEQ ID NO: 21623 - DNA, 8 bp, Artificial Sequence
  synthetic circulating small noncoding RNA (sncRNA) 5' transfer RNA (tRNA) half
cggccaag

SEQ ID NO: 21624 - DNA, 44 bp, Artificial Sequence
  synthetic circulating small noncoding RNA (sncRNA) 5' transfer RNA (tRNA) half
tcgtaaaccgaagatcgcgggttcgaaccccgtccgtgcctgcg

SEQ ID NO: 21625 - DNA, 20 bp, Artificial Sequence
  synthetic circulating small noncoding RNA (sncRNA) 5' transfer RNA (tRNA) half
ttcgattccccgacggggag

SEQ ID NO: 21626 - DNA, 10 bp, Artificial Sequence
  synthetic circulating small noncoding RNA (sncRNA) 5' transfer RNA (tRNA) half
ccacctcgtc

SEQ ID NO: 21627 - DNA, 28 bp, Artificial Sequence
  synthetic circulating small noncoding RNA (sncRNA) 5' transfer RNA (tRNA) half
tgtggcccgtacggggatcgaacccgcg

SEQ ID NO: 21628 - DNA, 39 bp, Artificial Sequence
  synthetic circulating small noncoding RNA (sncRNA) 5' transfer RNA (tRNA) half
aagcacagccgaaatagctcagttgggagagcgttagac

SEQ ID NO: 21629 - DNA, 10 bp, Artificial Sequence
  synthetic circulating small noncoding RNA (sncRNA) 5' transfer RNA (tRNA) half
gcatgagact

SEQ ID NO: 21630 - DNA, 38 bp, Artificial Sequence
  synthetic circulating small noncoding RNA (sncRNA) 5' transfer RNA (tRNA) half
taaaccaggggtcgcgagttcaaatctcgctggggcct

SEQ ID NO: 21631 - DNA, 19 bp, Artificial Sequence
  synthetic circulating small noncoding RNA (sncRNA) 5' transfer RNA (tRNA) half
aaaccgggcggaaacatat

SEQ ID NO: 21632 - DNA, 32 bp, Artificial Sequence
  synthetic circulating small noncoding RNA (sncRNA) 5' transfer RNA (tRNA) half
gggcacccggatttgaaccggggacctcttga

SEQ ID NO: 21633 - DNA, 29 bp, Artificial Sequence
  synthetic circulating small noncoding RNA (sncRNA) 5' transfer RNA (tRNA) half
ccctagtgtagtggttatcacgttcgcct

SEQ ID NO: 21634 - DNA, 16 bp, Artificial Sequence
  synthetic circulating small noncoding RNA (sncRNA) 5' transfer RNA (tRNA) half
ccctgttcgggcgctt

SEQ ID NO: 21635 - DNA, 15 bp, Artificial Sequence
  synthetic circulating small noncoding RNA (sncRNA) 5' transfer RNA (tRNA) half
ggattcgaacccagg

SEQ ID NO: 21636 - DNA, 25 bp, Artificial Sequence
  synthetic circulating small noncoding RNA (sncRNA) 5' transfer RNA (tRNA) half
ggttcgattcccgggcggcgcatgt

SEQ ID NO: 21637 - DNA, 29 bp, Artificial Sequence
  synthetic circulating small noncoding RNA (sncRNA) 5' transfer RNA (tRNA) half
cagtgccttatccattaggccactggggc

SEQ ID NO: 21638 - DNA, 10 bp, Artificial Sequence
  synthetic circulating small noncoding RNA (sncRNA) 5' transfer RNA (tRNA) half
accgctacac

SEQ ID NO: 21639 - DNA, 16 bp, Artificial Sequence
  synthetic circulating small noncoding RNA (sncRNA) 5' transfer RNA (tRNA) half
cgctcggccatcctga

SEQ ID NO: 21640 - DNA, 12 bp, Artificial Sequence
  synthetic circulating small noncoding RNA (sncRNA) 5' transfer RNA (tRNA) half
cgctatccattg

SEQ ID NO: 21641 - DNA, 14 bp, Artificial Sequence
  synthetic circulating small noncoding RNA (sncRNA) 5' transfer RNA (tRNA) half
ggtcctgggttcga

SEQ ID NO: 21642 - DNA, 7 bp, Artificial Sequence
  synthetic circulating small noncoding RNA (sncRNA) 5' transfer RNA (tRNA) half
gaccccg

SEQ ID NO: 21643 - DNA, 19 bp, Artificial Sequence
  synthetic circulating small noncoding RNA (sncRNA) 5' transfer RNA (tRNA) half
gctggggattgtgggttcg

SEQ ID NO: 21644 - DNA, 32 bp, Artificial Sequence
  synthetic circulating small noncoding RNA (sncRNA) 5' transfer RNA (tRNA) half
ggagggggcacccggatttgaaccagggacct

SEQ ID NO: 21645 - DNA, 10 bp, Artificial Sequence
  synthetic circulating small noncoding RNA (sncRNA) 5' transfer RNA (tRNA) half
gactacggta

SEQ ID NO: 21646 - DNA, 36 bp, Artificial Sequence
  synthetic circulating small noncoding RNA (sncRNA) 5' transfer RNA (tRNA) half
catgaggccccgggttcgatccccggcacctccact

SEQ ID NO: 21647 - DNA, 33 bp, Artificial Sequence
  synthetic circulating small noncoding RNA (sncRNA) 5' transfer RNA (tRNA) half
ttccatggtgtaatggttagcactctggactct

SEQ ID NO: 21648 - DNA, 24 bp, Artificial Sequence
  synthetic circulating small noncoding RNA (sncRNA) 5' transfer RNA (tRNA) half
tcgagccagccaggagtcgaacct

SEQ ID NO: 21649 - DNA, 45 bp, Artificial Sequence
  synthetic circulating small noncoding RNA (sncRNA) 5' transfer RNA (tRNA) half
acatggtctagcggttaggattcctggttttcacccaggcggccc

SEQ ID NO: 21650 - DNA, 18 bp, Artificial Sequence
  synthetic circulating small noncoding RNA (sncRNA) 5' transfer RNA (tRNA) half
aactgggctcgtccggga

SEQ ID NO: 21651 - DNA, 19 bp, Artificial Sequence
  synthetic circulating small noncoding RNA (sncRNA) 5' transfer RNA (tRNA) half
agaccaacgagccacggtg

SEQ ID NO: 21652 - DNA, 29 bp, Artificial Sequence
  synthetic circulating small noncoding RNA (sncRNA) 5' transfer RNA (tRNA) half
ccgtagtgtagtggtcatcacgctcgcct

SEQ ID NO: 21653 - DNA, 38 bp, Artificial Sequence
  synthetic circulating small noncoding RNA (sncRNA) 5' transfer RNA (tRNA) half
cgtagtcggcaggattcgaacctgcgcggggaaacccc

SEQ ID NO: 21654 - DNA, 11 bp, Artificial Sequence
  synthetic circulating small noncoding RNA (sncRNA) 5' transfer RNA (tRNA) half
aacccgggacc

SEQ ID NO: 21655 - DNA, 16 bp, Artificial Sequence
  synthetic circulating small noncoding RNA (sncRNA) 5' transfer RNA (tRNA) half
aggctccagtctcttc

SEQ ID NO: 21656 - DNA, 20 bp, Artificial Sequence
  synthetic circulating small noncoding RNA (sncRNA) 5' transfer RNA (tRNA) half
aaaacttgggctcgtccggg

SEQ ID NO: 21657 - DNA, 12 bp, Artificial Sequence
  synthetic circulating small noncoding RNA (sncRNA) 5' transfer RNA (tRNA) half
ccccgacgggga

SEQ ID NO: 21658 - DNA, 27 bp, Artificial Sequence
  synthetic circulating small noncoding RNA (sncRNA) 5' transfer RNA (tRNA) half
agaccggggttcgattccccgacgggg

SEQ ID NO: 21659 - DNA, 27 bp, Artificial Sequence
  synthetic circulating small noncoding RNA (sncRNA) 5' transfer RNA (tRNA) half
tacagacgacgaggatgggattcgaac

SEQ ID NO: 21660 - DNA, 26 bp, Artificial Sequence
  synthetic circulating small noncoding RNA (sncRNA) 5' transfer RNA (tRNA) half
gcgtgggttcgaatcccatcctcgtc

SEQ ID NO: 21661 - DNA, 24 bp, Artificial Sequence
  synthetic circulating small noncoding RNA (sncRNA) 5' transfer RNA (tRNA) half
cgaatcctaaccactagaccacca

SEQ ID NO: 21662 - DNA, 15 bp, Artificial Sequence
  synthetic circulating small noncoding RNA (sncRNA) 5' transfer RNA (tRNA) half
caacgcagagtacta

SEQ ID NO: 21663 - DNA, 15 bp, Artificial Sequence
  synthetic circulating small noncoding RNA (sncRNA) 5' transfer RNA (tRNA) half
tggtagagcgcatgc

SEQ ID NO: 21664 - DNA, 28 bp, Artificial Sequence
  synthetic circulating small noncoding RNA (sncRNA) 5' transfer RNA (tRNA) half
gagccagccaggagtcgaacctggaatc

SEQ ID NO: 21665 - DNA, 12 bp, Artificial Sequence
  synthetic circulating small noncoding RNA (sncRNA) 5' transfer RNA (tRNA) half
accatcctctgc

SEQ ID NO: 21666 - DNA, 24 bp, Artificial Sequence
  synthetic circulating small noncoding RNA (sncRNA) 5' transfer RNA (tRNA) half
ttagcactctggactctgaatcca

SEQ ID NO: 21667 - DNA, 28 bp, Artificial Sequence
  synthetic circulating small noncoding RNA (sncRNA) 5' transfer RNA (tRNA) half
gggatgtagctcagtggtagagcgcgcg

SEQ ID NO: 21668 - DNA, 16 bp, Artificial Sequence
  synthetic circulating small noncoding RNA (sncRNA) 5' transfer RNA (tRNA) half
ggttcgactccggctc

SEQ ID NO: 21669 - DNA, 29 bp, Artificial Sequence
  synthetic circulating small noncoding RNA (sncRNA) 5' transfer RNA (tRNA) half
gcagagtggcgcagcggaagcgtgctggg

SEQ ID NO: 21670 - DNA, 34 bp, Artificial Sequence
  synthetic circulating small noncoding RNA (sncRNA) 5' transfer RNA (tRNA) half
gtgtggcccgtacggggatcgaacccgcgacctt

SEQ ID NO: 21671 - DNA, 21 bp, Artificial Sequence
  synthetic circulating small noncoding RNA (sncRNA) 5' transfer RNA (tRNA) half
agacgacgaaggtgggattcg

SEQ ID NO: 21672 - DNA, 21 bp, Artificial Sequence
  synthetic circulating small noncoding RNA (sncRNA) 5' transfer RNA (tRNA) half
ggtttcgatccatcgacctct

SEQ ID NO: 21673 - DNA, 15 bp, Artificial Sequence
  synthetic circulating small noncoding RNA (sncRNA) 5' transfer RNA (tRNA) half
gtgagttcgatcctc

SEQ ID NO: 21674 - DNA, 17 bp, Artificial Sequence
  synthetic circulating small noncoding RNA (sncRNA) 5' transfer RNA (tRNA) half
cccagaggtcgatggat

SEQ ID NO: 21675 - DNA, 33 bp, Artificial Sequence
  synthetic circulating small noncoding RNA (sncRNA) 5' transfer RNA (tRNA) half
tcagaagattgagggttcgaatcccttcgtggt

SEQ ID NO: 21676 - DNA, 18 bp, Artificial Sequence
  synthetic circulating small noncoding RNA (sncRNA) 5' transfer RNA (tRNA) half
ctcaccgccgcggcccgg

SEQ ID NO: 21677 - DNA, 31 bp, Artificial Sequence
  synthetic circulating small noncoding RNA (sncRNA) 5' transfer RNA (tRNA) half
gtgcattggccgggaatcgaacccgggcctc

SEQ ID NO: 21678 - DNA, 25 bp, Artificial Sequence
  synthetic circulating small noncoding RNA (sncRNA) 5' transfer RNA (tRNA) half
tagtggttaggattcggcgctctca

SEQ ID NO: 21679 - DNA, 37 bp, Artificial Sequence
  synthetic circulating small noncoding RNA (sncRNA) 5' transfer RNA (tRNA) half
tcccacatggtctagcggttaggattcctggttttca

SEQ ID NO: 21680 - DNA, 42 bp, Artificial Sequence
  synthetic circulating small noncoding RNA (sncRNA) 5' transfer RNA (tRNA) half
ccggatttgaaccggggacctcttgatctgcagtcaaatgct

SEQ ID NO: 21681 - DNA, 22 bp, Artificial Sequence
  synthetic circulating small noncoding RNA (sncRNA) 5' transfer RNA (tRNA) half
gccgaaatagctcagttgggag

SEQ ID NO: 21682 - DNA, 21 bp, Artificial Sequence
  synthetic circulating small noncoding RNA (sncRNA) 5' transfer RNA (tRNA) half
taggagtcgaacctacaatct

SEQ ID NO: 21683 - DNA, 12 bp, Artificial Sequence
  synthetic circulating small noncoding RNA (sncRNA) 5' transfer RNA (tRNA) half
tcggttcccggc

SEQ ID NO: 21684 - DNA, 43 bp, Artificial Sequence
  synthetic circulating small noncoding RNA (sncRNA) 5' transfer RNA (tRNA) half
tcgtaaaccgaagatcgcgggttcgaaccccgtccgtgcctgc

SEQ ID NO: 21685 - DNA, 18 bp, Artificial Sequence
  synthetic circulating small noncoding RNA (sncRNA) 5' transfer RNA (tRNA) half
gtgtagtggtatcatgca

SEQ ID NO: 21686 - DNA, 9 bp, Artificial Sequence
  synthetic circulating small noncoding RNA (sncRNA) 5' transfer RNA (tRNA) half
gccaccggg

SEQ ID NO: 21687 - DNA, 23 bp, Artificial Sequence
  synthetic circulating small noncoding RNA (sncRNA) 5' transfer RNA (tRNA) half
ggccccgggttcgatccccggca

SEQ ID NO: 21688 - DNA, 22 bp, Artificial Sequence
  synthetic circulating small noncoding RNA (sncRNA) 5' transfer RNA (tRNA) half
aacccacgcctccattcggaga

SEQ ID NO: 21689 - DNA, 19 bp, Artificial Sequence
  synthetic circulating small noncoding RNA (sncRNA) 5' transfer RNA (tRNA) half
aggtccctggttcaaatcc

SEQ ID NO: 21690 - DNA, 29 bp, Artificial Sequence
  synthetic circulating small noncoding RNA (sncRNA) 5' transfer RNA (tRNA) half
ggtgagagcgccgaatcctaaccactaga

SEQ ID NO: 21691 - DNA, 35 bp, Artificial Sequence
  synthetic circulating small noncoding RNA (sncRNA) 5' transfer RNA (tRNA) half
ccagtttccgtagtgtagtggttatcacgttcgcc

SEQ ID NO: 21692 - DNA, 20 bp, Artificial Sequence
  synthetic circulating small noncoding RNA (sncRNA) 5' transfer RNA (tRNA) half
aggcccgggttcggttcccg

SEQ ID NO: 21693 - DNA, 32 bp, Artificial Sequence
  synthetic circulating small noncoding RNA (sncRNA) 5' transfer RNA (tRNA) half
tgtgtcagaagtgggattcgaacccacgcctc

SEQ ID NO: 21694 - DNA, 6 bp, Artificial Sequence
  synthetic circulating small noncoding RNA (sncRNA) 5' transfer RNA (tRNA) half
accgct

SEQ ID NO: 21695 - DNA, 16 bp, Artificial Sequence
  synthetic circulating small noncoding RNA (sncRNA) 5' transfer RNA (tRNA) half
tcccggacgagccctg

SEQ ID NO: 21696 - DNA, 21 bp, Artificial Sequence
  synthetic circulating small noncoding RNA (sncRNA) 5' transfer RNA (tRNA) half
tccgtagtgtagtggttatca

SEQ ID NO: 21697 - DNA, 23 bp, Artificial Sequence
  synthetic circulating small noncoding RNA (sncRNA) 5' transfer RNA (tRNA) half
ccgtagtcggcaggattcgaacc

SEQ ID NO: 21698 - DNA, 24 bp, Artificial Sequence
  synthetic circulating small noncoding RNA (sncRNA) 5' transfer RNA (tRNA) half
tggtctaggggtatgattctcggt

SEQ ID NO: 21699 - DNA, 30 bp, Artificial Sequence
  synthetic circulating small noncoding RNA (sncRNA) 5' transfer RNA (tRNA) half
ctaatggataaggcattggcctcctaagcc

SEQ ID NO: 21700 - DNA, 19 bp, Artificial Sequence
  synthetic circulating small noncoding RNA (sncRNA) 5' transfer RNA (tRNA) half
tgcagtcaaatgctctacc

SEQ ID NO: 21701 - DNA, 20 bp, Artificial Sequence
  synthetic circulating small noncoding RNA (sncRNA) 5' transfer RNA (tRNA) half
cgatccccgtacgggccaaa

SEQ ID NO: 21702 - DNA, 13 bp, Artificial Sequence
  synthetic circulating small noncoding RNA (sncRNA) 5' transfer RNA (tRNA) half
ggagaccggggtt

SEQ ID NO: 21703 - DNA, 8 bp, Artificial Sequence
  synthetic circulating small noncoding RNA (sncRNA) 5' transfer RNA (tRNA) half
caggggag

SEQ ID NO: 21704 - DNA, 12 bp, Artificial Sequence
  synthetic circulating small noncoding RNA (sncRNA) 5' transfer RNA (tRNA) half
actccggctcga

SEQ ID NO: 21705 - DNA, 23 bp, Artificial Sequence
  synthetic circulating small noncoding RNA (sncRNA) 5' transfer RNA (tRNA) half
gctaaccattacaccatggaacc

SEQ ID NO: 21706 - DNA, 36 bp, Artificial Sequence
  synthetic circulating small noncoding RNA (sncRNA) 5' transfer RNA (tRNA) half
tctgatgctctaccgactgagctatccgggcgctct

SEQ ID NO: 21707 - DNA, 18 bp, Artificial Sequence
  synthetic circulating small noncoding RNA (sncRNA) 5' transfer RNA (tRNA) half
atcccggacgagccctgt

SEQ ID NO: 21708 - DNA, 16 bp, Artificial Sequence
  synthetic circulating small noncoding RNA (sncRNA) 5' transfer RNA (tRNA) half
gggttcgattcccggc

SEQ ID NO: 21709 - DNA, 40 bp, Artificial Sequence
  synthetic circulating small noncoding RNA (sncRNA) 5' transfer RNA (tRNA) half
ccgctggtgtagtggtatcatgcaagattcccattcttgc

SEQ ID NO: 21710 - DNA, 17 bp, Artificial Sequence
  synthetic circulating small noncoding RNA (sncRNA) 5' transfer RNA (tRNA) half
tcccacttctgacaaat

SEQ ID NO: 21711 - DNA, 36 bp, Artificial Sequence
  synthetic circulating small noncoding RNA (sncRNA) 5' transfer RNA (tRNA) half
accgacgaggatgggattcgaacccacgcgtgcaaa

SEQ ID NO: 21712 - DNA, 13 bp, Artificial Sequence
  synthetic circulating small noncoding RNA (sncRNA) 5' transfer RNA (tRNA) half
ctggttcgaatcc

SEQ ID NO: 21713 - DNA, 45 bp, Artificial Sequence
  synthetic circulating small noncoding RNA (sncRNA) 5' transfer RNA (tRNA) half
tccagtctcttcggaggcgtgggttcgaatcccaccgctgccagg

SEQ ID NO: 21714 - DNA, 26 bp, Artificial Sequence
  synthetic circulating small noncoding RNA (sncRNA) 5' transfer RNA (tRNA) half
ctgccttccaagcagttgacccgggt

SEQ ID NO: 21715 - DNA, 25 bp, Artificial Sequence
  synthetic circulating small noncoding RNA (sncRNA) 5' transfer RNA (tRNA) half
ccgggaatcgaacccgggcctcccg

SEQ ID NO: 21716 - DNA, 12 bp, Artificial Sequence
  synthetic circulating small noncoding RNA (sncRNA) 5' transfer RNA (tRNA) half
ccagcggggcct

SEQ ID NO: 21717 - DNA, 35 bp, Artificial Sequence
  synthetic circulating small noncoding RNA (sncRNA) 5' transfer RNA (tRNA) half
ggttgctgcggccacaacgcagagtactaaccact

SEQ ID NO: 21718 - DNA, 21 bp, Artificial Sequence
  synthetic circulating small noncoding RNA (sncRNA) 5' transfer RNA (tRNA) half
ggcaagtgcattggccgggaa

SEQ ID NO: 21719 - DNA, 28 bp, Artificial Sequence
  synthetic circulating small noncoding RNA (sncRNA) 5' transfer RNA (tRNA) half
gaccccgacgtgattcgaacacgcagcc

SEQ ID NO: 21720 - DNA, 29 bp, Artificial Sequence
  synthetic circulating small noncoding RNA (sncRNA) 5' transfer RNA (tRNA) half
agagtccagagtgctaaccattacaccat

SEQ ID NO: 21721 - DNA, 19 bp, Artificial Sequence
  synthetic circulating small noncoding RNA (sncRNA) 5' transfer RNA (tRNA) half
gtcctgggttcgagcccca

SEQ ID NO: 21722 - DNA, 37 bp, Artificial Sequence
  synthetic circulating small noncoding RNA (sncRNA) 5' transfer RNA (tRNA) half
aaaccaggaatcctaaccgctagaccatgtgggaact

SEQ ID NO: 21723 - DNA, 35 bp, Artificial Sequence
  synthetic circulating small noncoding RNA (sncRNA) 5' transfer RNA (tRNA) half
ggttccatagtgtagcggttatcacgtctgcttta

SEQ ID NO: 21724 - DNA, 38 bp, Artificial Sequence
  synthetic circulating small noncoding RNA (sncRNA) 5' transfer RNA (tRNA) half
cgtgggaggcgagaattctaccattgaactaccaatgc

SEQ ID NO: 21725 - DNA, 24 bp, Artificial Sequence
  synthetic circulating small noncoding RNA (sncRNA) 5' transfer RNA (tRNA) half
cgcccaacgtggggctcgaaccca

SEQ ID NO: 21726 - DNA, 13 bp, Artificial Sequence
  synthetic circulating small noncoding RNA (sncRNA) 5' transfer RNA (tRNA) half
aaccaggaatcct

SEQ ID NO: 21727 - DNA, 40 bp, Artificial Sequence
  synthetic circulating small noncoding RNA (sncRNA) 5' transfer RNA (tRNA) half
tggcagcggtgggattcgaacccacgcccccgaagagact

SEQ ID NO: 21728 - DNA, 24 bp, Artificial Sequence
  synthetic circulating small noncoding RNA (sncRNA) 5' transfer RNA (tRNA) half
ttccccgcgcaggttcgaatcctg

SEQ ID NO: 21729 - DNA, 17 bp, Artificial Sequence
  synthetic circulating small noncoding RNA (sncRNA) 5' transfer RNA (tRNA) half
tctaggggtatgattct

SEQ ID NO: 21730 - DNA, 28 bp, Artificial Sequence
  synthetic circulating small noncoding RNA (sncRNA) 5' transfer RNA (tRNA) half
tctgaggttcgaactcaggaccttcaga

SEQ ID NO: 21731 - DNA, 34 bp, Artificial Sequence
  synthetic circulating small noncoding RNA (sncRNA) 5' transfer RNA (tRNA) half
ggcggcccgggttcgactcccggtgtgggaacgc

SEQ ID NO: 21732 - DNA, 34 bp, Artificial Sequence
  synthetic circulating small noncoding RNA (sncRNA) 5' transfer RNA (tRNA) half
cagggattgtgggttcgagtcccatctggggtgg

SEQ ID NO: 21733 - DNA, 37 bp, Artificial Sequence
  synthetic circulating small noncoding RNA (sncRNA) 5' transfer RNA (tRNA) half
ggcccggatagctcagtcggtagagcatcagactttt

SEQ ID NO: 21734 - DNA, 29 bp, Artificial Sequence
  synthetic circulating small noncoding RNA (sncRNA) 5' transfer RNA (tRNA) half
gggggtatagctcaggggtagagcatttg

SEQ ID NO: 21735 - DNA, 19 bp, Artificial Sequence
  synthetic circulating small noncoding RNA (sncRNA) 5' transfer RNA (tRNA) half
ccacagagactttggcgct

SEQ ID NO: 21736 - DNA, 41 bp, Artificial Sequence
  synthetic circulating small noncoding RNA (sncRNA) 5' transfer RNA (tRNA) half
ctgccctctctgaggttcgaactcaggaccttcagattatg

SEQ ID NO: 21737 - DNA, 38 bp, Artificial Sequence
  synthetic circulating small noncoding RNA (sncRNA) 5' transfer RNA (tRNA) half
aagcgagaatcatacccctagaccaacgagccgctctc

SEQ ID NO: 21738 - DNA, 25 bp, Artificial Sequence
  synthetic circulating small noncoding RNA (sncRNA) 5' transfer RNA (tRNA) half
ggggctcgaacccacgaccctgaga

SEQ ID NO: 21739 - DNA, 19 bp, Artificial Sequence
  synthetic circulating small noncoding RNA (sncRNA) 5' transfer RNA (tRNA) half
tagtggctaggattcggcg

SEQ ID NO: 21740 - DNA, 16 bp, Artificial Sequence
  synthetic circulating small noncoding RNA (sncRNA) 5' transfer RNA (tRNA) half
gtccgggatttgaacc

SEQ ID NO: 21741 - DNA, 17 bp, Artificial Sequence
  synthetic circulating small noncoding RNA (sncRNA) 5' transfer RNA (tRNA) half
aatcccatcctcgtcgt

SEQ ID NO: 21742 - DNA, 34 bp, Artificial Sequence
  synthetic circulating small noncoding RNA (sncRNA) 5' transfer RNA (tRNA) half
tcgacctctgggttatgggcccagcacgcttccg

SEQ ID NO: 21743 - DNA, 16 bp, Artificial Sequence
  synthetic circulating small noncoding RNA (sncRNA) 5' transfer RNA (tRNA) half
gggacctctcgcaccc

SEQ ID NO: 21744 - DNA, 23 bp, Artificial Sequence
  synthetic circulating small noncoding RNA (sncRNA) 5' transfer RNA (tRNA) half
tcacggcgagctaccagggacct

SEQ ID NO: 21745 - DNA, 21 bp, Artificial Sequence
  synthetic circulating small noncoding RNA (sncRNA) 5' transfer RNA (tRNA) half
gccccagcgagatttgaactc

SEQ ID NO: 21746 - DNA, 29 bp, Artificial Sequence
  synthetic circulating small noncoding RNA (sncRNA) 5' transfer RNA (tRNA) half
aagcgcccgaacagggacttgaaccctgg

SEQ ID NO: 21747 - DNA, 6 bp, Artificial Sequence
  synthetic circulating small noncoding RNA (sncRNA) 5' transfer RNA (tRNA) half
cgcgcg

SEQ ID NO: 21748 - DNA, 20 bp, Artificial Sequence
  synthetic circulating small noncoding RNA (sncRNA) 5' transfer RNA (tRNA) half
aggttcgaactcaggacctt

SEQ ID NO: 21749 - DNA, 18 bp, Artificial Sequence
  synthetic circulating small noncoding RNA (sncRNA) 5' transfer RNA (tRNA) half
ggcgagcgtgatgaccac

SEQ ID NO: 21750 - DNA, 35 bp, Artificial Sequence
  synthetic circulating small noncoding RNA (sncRNA) 5' transfer RNA (tRNA) half
agcgagaatcatacccctagaccaacgagccagat

SEQ ID NO: 21751 - DNA, 20 bp, Artificial Sequence
  synthetic circulating small noncoding RNA (sncRNA) 5' transfer RNA (tRNA) half
aaaaatgttcccgcccggtt

SEQ ID NO: 21752 - DNA, 21 bp, Artificial Sequence
  synthetic circulating small noncoding RNA (sncRNA) 5' transfer RNA (tRNA) half
tcaaatcacgtcggggtcagt

SEQ ID NO: 21753 - DNA, 24 bp, Artificial Sequence
  synthetic circulating small noncoding RNA (sncRNA) 5' transfer RNA (tRNA) half
tggtctaggggtatgattctcact

SEQ ID NO: 21754 - DNA, 34 bp, Artificial Sequence
  synthetic circulating small noncoding RNA (sncRNA) 5' transfer RNA (tRNA) half
ggtgcgagaggtcccgggttcaaatcccggacga

SEQ ID NO: 21755 - DNA, 27 bp, Artificial Sequence
  synthetic circulating small noncoding RNA (sncRNA) 5' transfer RNA (tRNA) half
cgggcctcccgcgtggcaggcgagaat

SEQ ID NO: 21756 - DNA, 16 bp, Artificial Sequence
  synthetic circulating small noncoding RNA (sncRNA) 5' transfer RNA (tRNA) half
gtgtgtcaggatggcc

SEQ ID NO: 21757 - DNA, 33 bp, Artificial Sequence
  synthetic circulating small noncoding RNA (sncRNA) 5' transfer RNA (tRNA) half
cagcaacctcggttcgaatccgagtcacggcat

SEQ ID NO: 21758 - DNA, 22 bp, Artificial Sequence
  synthetic circulating small noncoding RNA (sncRNA) 5' transfer RNA (tRNA) half
tggttcgactccggctcgaagg

SEQ ID NO: 21759 - DNA, 28 bp, Artificial Sequence
  synthetic circulating small noncoding RNA (sncRNA) 5' transfer RNA (tRNA) half
aagtgggattcgaacccacgcctccatt

SEQ ID NO: 21760 - DNA, 25 bp, Artificial Sequence
  synthetic circulating small noncoding RNA (sncRNA) 5' transfer RNA (tRNA) half
cggggttcgattccccgacggggag

SEQ ID NO: 21761 - DNA, 32 bp, Artificial Sequence
  synthetic circulating small noncoding RNA (sncRNA) 5' transfer RNA (tRNA) half
aagagtcccatgctctaccgactgagctagcc

SEQ ID NO: 21762 - DNA, 21 bp, Artificial Sequence
  synthetic circulating small noncoding RNA (sncRNA) 5' transfer RNA (tRNA) half
gttcgatcccgggtttcggca

SEQ ID NO: 21763 - DNA, 35 bp, Artificial Sequence
  synthetic circulating small noncoding RNA (sncRNA) 5' transfer RNA (tRNA) half
catgccgtgactcggattcgaaccgaggttgctgc

SEQ ID NO: 21764 - DNA, 25 bp, Artificial Sequence
  synthetic circulating small noncoding RNA (sncRNA) 5' transfer RNA (tRNA) half
tccagggttcaagtccctgttcggg

SEQ ID NO: 21765 - DNA, 6 bp, Artificial Sequence
  synthetic circulating small noncoding RNA (sncRNA) 5' transfer RNA (tRNA) half
caggtg

SEQ ID NO: 21766 - DNA, 18 bp, Artificial Sequence
  synthetic circulating small noncoding RNA (sncRNA) 5' transfer RNA (tRNA) half
gaagatgccggggctcga

SEQ ID NO: 21767 - DNA, 22 bp, Artificial Sequence
  synthetic circulating small noncoding RNA (sncRNA) 5' transfer RNA (tRNA) half
gaactcggatcgctggattcaa

SEQ ID NO: 21768 - DNA, 11 bp, Artificial Sequence
  synthetic circulating small noncoding RNA (sncRNA) 5' transfer RNA (tRNA) half
tcgtggccgag

SEQ ID NO: 21769 - DNA, 36 bp, Artificial Sequence
  synthetic circulating small noncoding RNA (sncRNA) 5' transfer RNA (tRNA) half
cgtatggaggcgtgggttcgaatcccacttctgaca

SEQ ID NO: 21770 - DNA, 35 bp, Artificial Sequence
  synthetic circulating small noncoding RNA (sncRNA) 5' transfer RNA (tRNA) half
gtctaacgctctcccaactgagctatttcggcgct

SEQ ID NO: 21771 - DNA, 23 bp, Artificial Sequence
  synthetic circulating small noncoding RNA (sncRNA) 5' transfer RNA (tRNA) half
cctaaccgctagaccatatggga

SEQ ID NO: 21772 - DNA, 24 bp, Artificial Sequence
  synthetic circulating small noncoding RNA (sncRNA) 5' transfer RNA (tRNA) half
gcattggtagttcaatggtagaat

SEQ ID NO: 21773 - DNA, 37 bp, Artificial Sequence
  synthetic circulating small noncoding RNA (sncRNA) 5' transfer RNA (tRNA) half
aaacaggagatcctgggttcaaatcccagcggggcct

SEQ ID NO: 21774 - DNA, 28 bp, Artificial Sequence
  synthetic circulating small noncoding RNA (sncRNA) 5' transfer RNA (tRNA) half
ggcccgggttcgactcccggtatgggaa

SEQ ID NO: 21775 - DNA, 23 bp, Artificial Sequence
  synthetic circulating small noncoding RNA (sncRNA) 5' transfer RNA (tRNA) half
ctctaccgactgagctatccggg

SEQ ID NO: 21776 - DNA, 23 bp, Artificial Sequence
  synthetic circulating small noncoding RNA (sncRNA) 5' transfer RNA (tRNA) half
gacccagtggcctaatggataag

SEQ ID NO: 21777 - DNA, 38 bp, Artificial Sequence
  synthetic circulating small noncoding RNA (sncRNA) 5' transfer RNA (tRNA) half
tcagtcggtagagcatgagactcttaatctcagggtcg

SEQ ID NO: 21778 - DNA, 15 bp, Artificial Sequence
  synthetic circulating small noncoding RNA (sncRNA) 5' transfer RNA (tRNA) half
ttaaagcgcctgtct

SEQ ID NO: 21779 - DNA, 21 bp, Artificial Sequence
  synthetic circulating small noncoding RNA (sncRNA) 5' transfer RNA (tRNA) half
taagcgagaatcataccccta

SEQ ID NO: 21780 - DNA, 17 bp, Artificial Sequence
  synthetic circulating small noncoding RNA (sncRNA) 5' transfer RNA (tRNA) half
ccatttgagctaatccc

SEQ ID NO: 21781 - DNA, 16 bp, Artificial Sequence
  synthetic circulating small noncoding RNA (sncRNA) 5' transfer RNA (tRNA) half
agaattctaccactga

SEQ ID NO: 21782 - DNA, 5 bp, Artificial Sequence
  synthetic circulating small noncoding RNA (sncRNA) 5' transfer RNA (tRNA) half
agtcg

SEQ ID NO: 21783 - DNA, 18 bp, Artificial Sequence
  synthetic circulating small noncoding RNA (sncRNA) 5' transfer RNA (tRNA) half
cgtatagtggttagtact

SEQ ID NO: 21784 - DNA, 15 bp, Artificial Sequence
  synthetic circulating small noncoding RNA (sncRNA) 5' transfer RNA (tRNA) half
gttcgactcccggca

SEQ ID NO: 21785 - DNA, 16 bp, Artificial Sequence
  synthetic circulating small noncoding RNA (sncRNA) 5' transfer RNA (tRNA) half
ccattcttgcgacccg

SEQ ID NO: 21786 - DNA, 36 bp, Artificial Sequence
  synthetic circulating small noncoding RNA (sncRNA) 5' transfer RNA (tRNA) half
tagtggttaggattcggcgctctcaccgccgcggcc

SEQ ID NO: 21787 - DNA, 14 bp, Artificial Sequence
  synthetic circulating small noncoding RNA (sncRNA) 5' transfer RNA (tRNA) half
acgacgaggatggg

SEQ ID NO: 21788 - DNA, 27 bp, Artificial Sequence
  synthetic circulating small noncoding RNA (sncRNA) 5' transfer RNA (tRNA) half
ggtgagagcaatgactcctaaccacta

SEQ ID NO: 21789 - DNA, 26 bp, Artificial Sequence
  synthetic circulating small noncoding RNA (sncRNA) 5' transfer RNA (tRNA) half
aaagtctgatgctctaccgactgagc

SEQ ID NO: 21790 - DNA, 13 bp, Artificial Sequence
  synthetic circulating small noncoding RNA (sncRNA) 5' transfer RNA (tRNA) half
cgtccctgggtgg

SEQ ID NO: 21791 - DNA, 32 bp, Artificial Sequence
  synthetic circulating small noncoding RNA (sncRNA) 5' transfer RNA (tRNA) half
aggtcctgggttcgatccccagcatctccagg

SEQ ID NO: 21792 - DNA, 22 bp, Artificial Sequence
  synthetic circulating small noncoding RNA (sncRNA) 5' transfer RNA (tRNA) half
ttccgtagtgtagtggttatca

SEQ ID NO: 21793 - DNA, 26 bp, Artificial Sequence
  synthetic circulating small noncoding RNA (sncRNA) 5' transfer RNA (tRNA) half
agagcccgtagtcggcaggattcgaa

SEQ ID NO: 21794 - DNA, 31 bp, Artificial Sequence
  synthetic circulating small noncoding RNA (sncRNA) 5' transfer RNA (tRNA) half
acaacgcagagtactaaccactatacgatca

SEQ ID NO: 21795 - DNA, 19 bp, Artificial Sequence
  synthetic circulating small noncoding RNA (sncRNA) 5' transfer RNA (tRNA) half
tctgcattggccgggaatc

SEQ ID NO: 21796 - DNA, 17 bp, Artificial Sequence
  synthetic circulating small noncoding RNA (sncRNA) 5' transfer RNA (tRNA) half
cccggctagctcagtcg

SEQ ID NO: 21797 - DNA, 23 bp, Artificial Sequence
  synthetic circulating small noncoding RNA (sncRNA) 5' transfer RNA (tRNA) half
gagctgccgaaacccgggatcga

SEQ ID NO: 21798 - DNA, 13 bp, Artificial Sequence
  synthetic circulating small noncoding RNA (sncRNA) 5' transfer RNA (tRNA) half
caggaatcctaac

SEQ ID NO: 21799 - DNA, 26 bp, Artificial Sequence
  synthetic circulating small noncoding RNA (sncRNA) 5' transfer RNA (tRNA) half
ggttatgggcccagcacgcttccgct

SEQ ID NO: 21800 - DNA, 9 bp, Artificial Sequence
  synthetic circulating small noncoding RNA (sncRNA) 5' transfer RNA (tRNA) half
gctggcggc

SEQ ID NO: 21801 - DNA, 31 bp, Artificial Sequence
  synthetic circulating small noncoding RNA (sncRNA) 5' transfer RNA (tRNA) half
tggtctagcggttaggattcctggttttcac

SEQ ID NO: 21802 - DNA, 31 bp, Artificial Sequence
  synthetic circulating small noncoding RNA (sncRNA) 5' transfer RNA (tRNA) half
aggtcgctggttcgattccggctcgaaggac

SEQ ID NO: 21803 - DNA, 25 bp, Artificial Sequence
  synthetic circulating small noncoding RNA (sncRNA) 5' transfer RNA (tRNA) half
ctcggatcgctggattcaaagtcca

SEQ ID NO: 21804 - DNA, 25 bp, Artificial Sequence
  synthetic circulating small noncoding RNA (sncRNA) 5' transfer RNA (tRNA) half
tggactttgaatccagcgatccgag

SEQ ID NO: 21805 - DNA, 16 bp, Artificial Sequence
  synthetic circulating small noncoding RNA (sncRNA) 5' transfer RNA (tRNA) half
cggccacgactacatg

SEQ ID NO: 21806 - DNA, 40 bp, Artificial Sequence
  synthetic circulating small noncoding RNA (sncRNA) 5' transfer RNA (tRNA) half
tccgtagtgtagtggttatcacgttcgcctcacacgcgaa

SEQ ID NO: 21807 - DNA, 28 bp, Artificial Sequence
  synthetic circulating small noncoding RNA (sncRNA) 5' transfer RNA (tRNA) half
gctgggattcgaacccaggatctcctgt

SEQ ID NO: 21808 - DNA, 17 bp, Artificial Sequence
  synthetic circulating small noncoding RNA (sncRNA) 5' transfer RNA (tRNA) half
gggtgcggccggagctc

SEQ ID NO: 21809 - DNA, 34 bp, Artificial Sequence
  synthetic circulating small noncoding RNA (sncRNA) 5' transfer RNA (tRNA) half
gcactctggactctgaatccagcgatccgagttc

SEQ ID NO: 21810 - DNA, 28 bp, Artificial Sequence
  synthetic circulating small noncoding RNA (sncRNA) 5' transfer RNA (tRNA) half
gagtggttcaattccacctttcgggcgg

SEQ ID NO: 21811 - DNA, 16 bp, Artificial Sequence
  synthetic circulating small noncoding RNA (sncRNA) 5' transfer RNA (tRNA) half
gaacacgcaaccttct

SEQ ID NO: 21812 - DNA, 21 bp, Artificial Sequence
  synthetic circulating small noncoding RNA (sncRNA) 5' transfer RNA (tRNA) half
agtccagtgtgctaaccatta

SEQ ID NO: 21813 - DNA, 14 bp, Artificial Sequence
  synthetic circulating small noncoding RNA (sncRNA) 5' transfer RNA (tRNA) half
tcgagtcctgccgc

SEQ ID NO: 21814 - DNA, 21 bp, Artificial Sequence
  synthetic circulating small noncoding RNA (sncRNA) 5' transfer RNA (tRNA) half
agccgtttggagatgccgggg

SEQ ID NO: 21815 - DNA, 12 bp, Artificial Sequence
  synthetic circulating small noncoding RNA (sncRNA) 5' transfer RNA (tRNA) half
gggtttcggcaa

SEQ ID NO: 21816 - DNA, 12 bp, Artificial Sequence
  synthetic circulating small noncoding RNA (sncRNA) 5' transfer RNA (tRNA) half
gccggactcgaa

SEQ ID NO: 21817 - DNA, 20 bp, Artificial Sequence
  synthetic circulating small noncoding RNA (sncRNA) 5' transfer RNA (tRNA) half
gtagcgtggccgagcggtct

SEQ ID NO: 21818 - DNA, 23 bp, Artificial Sequence
  synthetic circulating small noncoding RNA (sncRNA) 5' transfer RNA (tRNA) half
tcgctggattcagagtccagagt

SEQ ID NO: 21819 - DNA, 19 bp, Artificial Sequence
  synthetic circulating small noncoding RNA (sncRNA) 5' transfer RNA (tRNA) half
cgaacccacaatccctggc

SEQ ID NO: 21820 - DNA, 16 bp, Artificial Sequence
  synthetic circulating small noncoding RNA (sncRNA) 5' transfer RNA (tRNA) half
ctaccatttgagctaa

SEQ ID NO: 21821 - DNA, 22 bp, Artificial Sequence
  synthetic circulating small noncoding RNA (sncRNA) 5' transfer RNA (tRNA) half
ccgggactcgaacccggaacct

SEQ ID NO: 21822 - DNA, 38 bp, Artificial Sequence
  synthetic circulating small noncoding RNA (sncRNA) 5' transfer RNA (tRNA) half
ccacgaccctgagattaagagtctcatgctctaccgac

SEQ ID NO: 21823 - DNA, 13 bp, Artificial Sequence
  synthetic circulating small noncoding RNA (sncRNA) 5' transfer RNA (tRNA) half
gagcatttgactg

SEQ ID NO: 21824 - DNA, 13 bp, Artificial Sequence
  synthetic circulating small noncoding RNA (sncRNA) 5' transfer RNA (tRNA) half
gagaggtccccgg

SEQ ID NO: 21825 - DNA, 38 bp, Artificial Sequence
  synthetic circulating small noncoding RNA (sncRNA) 5' transfer RNA (tRNA) half
tcccacatggtctagcggttaggattcctggttttcac

SEQ ID NO: 21826 - DNA, 41 bp, Artificial Sequence
  synthetic circulating small noncoding RNA (sncRNA) 5' transfer RNA (tRNA) half
tccattggggtttccccgcgcaggttcgaatcctgccgact

SEQ ID NO: 21827 - DNA, 31 bp, Artificial Sequence
  synthetic circulating small noncoding RNA (sncRNA) 5' transfer RNA (tRNA) half
agcattggtagttcaatggtagaattctcgc

SEQ ID NO: 21828 - DNA, 30 bp, Artificial Sequence
  synthetic circulating small noncoding RNA (sncRNA) 5' transfer RNA (tRNA) half
gtctcatgctctaccaactgagctagcagt

SEQ ID NO: 21829 - DNA, 16 bp, Artificial Sequence
  synthetic circulating small noncoding RNA (sncRNA) 5' transfer RNA (tRNA) half
aaaccaggaatcctaa

SEQ ID NO: 21830 - DNA, 32 bp, Artificial Sequence
  synthetic circulating small noncoding RNA (sncRNA) 5' transfer RNA (tRNA) half
gaggcccgggttcgattcccggccaatgcacg

SEQ ID NO: 21831 - DNA, 12 bp, Artificial Sequence
  synthetic circulating small noncoding RNA (sncRNA) 5' transfer RNA (tRNA) half
ccagcggtgcct

SEQ ID NO: 21832 - DNA, 31 bp, Artificial Sequence
  synthetic circulating small noncoding RNA (sncRNA) 5' transfer RNA (tRNA) half
gggggtaaagctcaggggtagagcatttgac

SEQ ID NO: 21833 - DNA, 38 bp, Artificial Sequence
  synthetic circulating small noncoding RNA (sncRNA) 5' transfer RNA (tRNA) half
gtccgagaggtcccgggttcaaatcccggacgagcccc

SEQ ID NO: 21834 - DNA, 10 bp, Artificial Sequence
  synthetic circulating small noncoding RNA (sncRNA) 5' transfer RNA (tRNA) half
cttgggctcg

SEQ ID NO: 21835 - DNA, 20 bp, Artificial Sequence
  synthetic circulating small noncoding RNA (sncRNA) 5' transfer RNA (tRNA) half
ggcgagcgtgatgaccacta

SEQ ID NO: 21836 - DNA, 20 bp, Artificial Sequence
  synthetic circulating small noncoding RNA (sncRNA) 5' transfer RNA (tRNA) half
tgaaggtcctgagttcgaac

SEQ ID NO: 21837 - DNA, 18 bp, Artificial Sequence
  synthetic circulating small noncoding RNA (sncRNA) 5' transfer RNA (tRNA) half
cgatagcagaggatggtt

SEQ ID NO: 21838 - DNA, 25 bp, Artificial Sequence
  synthetic circulating small noncoding RNA (sncRNA) 5' transfer RNA (tRNA) half
ctcctaaccactagaccaccaggga

SEQ ID NO: 21839 - DNA, 11 bp, Artificial Sequence
  synthetic circulating small noncoding RNA (sncRNA) 5' transfer RNA (tRNA) half
gggaggcccgg

SEQ ID NO: 21840 - DNA, 21 bp, Artificial Sequence
  synthetic circulating small noncoding RNA (sncRNA) 5' transfer RNA (tRNA) half
ggttcaagtccctgttcgggc

SEQ ID NO: 21841 - DNA, 41 bp, Artificial Sequence
  synthetic circulating small noncoding RNA (sncRNA) 5' transfer RNA (tRNA) half
aatccattggggtttccccgcgcaggttcgaatcctgccga

SEQ ID NO: 21842 - DNA, 21 bp, Artificial Sequence
  synthetic circulating small noncoding RNA (sncRNA) 5' transfer RNA (tRNA) half
cctccccgtcggggaatcgaa

SEQ ID NO: 21843 - DNA, 26 bp, Artificial Sequence
  synthetic circulating small noncoding RNA (sncRNA) 5' transfer RNA (tRNA) half
gacgaaggtgggattcgaacccacgc

SEQ ID NO: 21844 - DNA, 23 bp, Artificial Sequence
  synthetic circulating small noncoding RNA (sncRNA) 5' transfer RNA (tRNA) half
aggttcgactcctggctggctcg

SEQ ID NO: 21845 - DNA, 19 bp, Artificial Sequence
  synthetic circulating small noncoding RNA (sncRNA) 5' transfer RNA (tRNA) half
gcggaaacaatgactcttt

SEQ ID NO: 21846 - DNA, 14 bp, Artificial Sequence
  synthetic circulating small noncoding RNA (sncRNA) 5' transfer RNA (tRNA) half
ccgactccgccggg

SEQ ID NO: 21847 - DNA, 5 bp, Artificial Sequence
  synthetic circulating small noncoding RNA (sncRNA) 5' transfer RNA (tRNA) half
ggcga

SEQ ID NO: 21848 - DNA, 24 bp, Artificial Sequence
  synthetic circulating small noncoding RNA (sncRNA) 5' transfer RNA (tRNA) half
gtcaggatggccgagtggtctaag

SEQ ID NO: 21849 - DNA, 16 bp, Artificial Sequence
  synthetic circulating small noncoding RNA (sncRNA) 5' transfer RNA (tRNA) half
tatccccgcctgtcac

SEQ ID NO: 21850 - DNA, 26 bp, Artificial Sequence
  synthetic circulating small noncoding RNA (sncRNA) 5' transfer RNA (tRNA) half
cgagccagccaggagtcgaacctaga

SEQ ID NO: 21851 - DNA, 20 bp, Artificial Sequence
  synthetic circulating small noncoding RNA (sncRNA) 5' transfer RNA (tRNA) half
ttgcgacccgggttcgattc

SEQ ID NO: 21852 - DNA, 21 bp, Artificial Sequence
  synthetic circulating small noncoding RNA (sncRNA) 5' transfer RNA (tRNA) half
agtcaaatgctctacccctga

SEQ ID NO: 21853 - DNA, 11 bp, Artificial Sequence
  synthetic circulating small noncoding RNA (sncRNA) 5' transfer RNA (tRNA) half
cgaacccacga

SEQ ID NO: 21854 - DNA, 39 bp, Artificial Sequence
  synthetic circulating small noncoding RNA (sncRNA) 5' transfer RNA (tRNA) half
ctggtggtctagtggttaggattcggcgctctcaccgcc

SEQ ID NO: 21855 - DNA, 15 bp, Artificial Sequence
  synthetic circulating small noncoding RNA (sncRNA) 5' transfer RNA (tRNA) half
cgaacccgggccgcc

SEQ ID NO: 21856 - DNA, 19 bp, Artificial Sequence
  synthetic circulating small noncoding RNA (sncRNA) 5' transfer RNA (tRNA) half
tcggccatcctggtgcagg

SEQ ID NO: 21857 - DNA, 18 bp, Artificial Sequence
  synthetic circulating small noncoding RNA (sncRNA) 5' transfer RNA (tRNA) half
atgcattggccgggaatc

SEQ ID NO: 21858 - DNA, 12 bp, Artificial Sequence
  synthetic circulating small noncoding RNA (sncRNA) 5' transfer RNA (tRNA) half
tcggcgctttca

SEQ ID NO: 21859 - DNA, 5 bp, Artificial Sequence
  synthetic circulating small noncoding RNA (sncRNA) 5' transfer RNA (tRNA) half
ccccc

SEQ ID NO: 21860 - DNA, 28 bp, Artificial Sequence
  synthetic circulating small noncoding RNA (sncRNA) 5' transfer RNA (tRNA) half
atgaccccgacgtgattcgaacacgcag

SEQ ID NO: 21861 - DNA, 20 bp, Artificial Sequence
  synthetic circulating small noncoding RNA (sncRNA) 5' transfer RNA (tRNA) half
tcctgccgactacgtgaatg

SEQ ID NO: 21862 - DNA, 17 bp, Artificial Sequence
  synthetic circulating small noncoding RNA (sncRNA) 5' transfer RNA (tRNA) half
ggttcgattccggctcg

SEQ ID NO: 21863 - DNA, 27 bp, Artificial Sequence
  synthetic circulating small noncoding RNA (sncRNA) 5' transfer RNA (tRNA) half
aactgcttggaaggcagctatgctcac

SEQ ID NO: 21864 - DNA, 27 bp, Artificial Sequence
  synthetic circulating small noncoding RNA (sncRNA) 5' transfer RNA (tRNA) half
taccgagccagccaggagtcgaacctg

SEQ ID NO: 21865 - DNA, 18 bp, Artificial Sequence
  synthetic circulating small noncoding RNA (sncRNA) 5' transfer RNA (tRNA) half
cgggcgactgtcacttct

SEQ ID NO: 21866 - DNA, 38 bp, Artificial Sequence
  synthetic circulating small noncoding RNA (sncRNA) 5' transfer RNA (tRNA) half
atggtctagcggttaggattcctggttttcacccaggc

SEQ ID NO: 21867 - DNA, 23 bp, Artificial Sequence
  synthetic circulating small noncoding RNA (sncRNA) 5' transfer RNA (tRNA) half
ctacagacgacgaggatgggatt

SEQ ID NO: 21868 - DNA, 35 bp, Artificial Sequence
  synthetic circulating small noncoding RNA (sncRNA) 5' transfer RNA (tRNA) half
tttaatctgagggtccagggttcaagtccctgttc

SEQ ID NO: 21869 - DNA, 10 bp, Artificial Sequence
  synthetic circulating small noncoding RNA (sncRNA) 5' transfer RNA (tRNA) half
acgagccccc

SEQ ID NO: 21870 - DNA, 21 bp, Artificial Sequence
  synthetic circulating small noncoding RNA (sncRNA) 5' transfer RNA (tRNA) half
tcgagccccagtggaaccagt

SEQ ID NO: 21871 - DNA, 21 bp, Artificial Sequence
  synthetic circulating small noncoding RNA (sncRNA) 5' transfer RNA (tRNA) half
gttgccccctctgaggttcga

SEQ ID NO: 21872 - DNA, 22 bp, Artificial Sequence
  synthetic circulating small noncoding RNA (sncRNA) 5' transfer RNA (tRNA) half
gctctcaccgccgcggcccggg

SEQ ID NO: 21873 - DNA, 10 bp, Artificial Sequence
  synthetic circulating small noncoding RNA (sncRNA) 5' transfer RNA (tRNA) half
gctcagtcag

SEQ ID NO: 21874 - DNA, 21 bp, Artificial Sequence
  synthetic circulating small noncoding RNA (sncRNA) 5' transfer RNA (tRNA) half
tacagtcctccgctctaccaa

SEQ ID NO: 21875 - DNA, 28 bp, Artificial Sequence
  synthetic circulating small noncoding RNA (sncRNA) 5' transfer RNA (tRNA) half
cctgggtgaaaaccaggaatcctaaccg

SEQ ID NO: 21876 - DNA, 12 bp, Artificial Sequence
  synthetic circulating small noncoding RNA (sncRNA) 5' transfer RNA (tRNA) half
acgcccccgaag

SEQ ID NO: 21877 - DNA, 25 bp, Artificial Sequence
  synthetic circulating small noncoding RNA (sncRNA) 5' transfer RNA (tRNA) half
tggcccgtacggggatcgaacccgc

SEQ ID NO: 21878 - DNA, 37 bp, Artificial Sequence
  synthetic circulating small noncoding RNA (sncRNA) 5' transfer RNA (tRNA) half
acaggagatcctgggttcgaatcccagcggtgccttt

SEQ ID NO: 21879 - DNA, 30 bp, Artificial Sequence
  synthetic circulating small noncoding RNA (sncRNA) 5' transfer RNA (tRNA) half
gattcggcgctctcaccgccgcggcccggg

SEQ ID NO: 21880 - DNA, 27 bp, Artificial Sequence
  synthetic circulating small noncoding RNA (sncRNA) 5' transfer RNA (tRNA) half
ggtcccaccgagatttgaactcggatc

SEQ ID NO: 21881 - DNA, 14 bp, Artificial Sequence
  synthetic circulating small noncoding RNA (sncRNA) 5' transfer RNA (tRNA) half
gaatccggctcgaa

SEQ ID NO: 21882 - DNA, 22 bp, Artificial Sequence
  synthetic circulating small noncoding RNA (sncRNA) 5' transfer RNA (tRNA) half
ttcgaatcccatcctcgtcgtt

SEQ ID NO: 21883 - DNA, 22 bp, Artificial Sequence
  synthetic circulating small noncoding RNA (sncRNA) 5' transfer RNA (tRNA) half
aggccgagaccgtccctgggtg

SEQ ID NO: 21884 - DNA, 15 bp, Artificial Sequence
  synthetic circulating small noncoding RNA (sncRNA) 5' transfer RNA (tRNA) half
cccgcctgtcacgcg

SEQ ID NO: 21885 - DNA, 20 bp, Artificial Sequence
  synthetic circulating small noncoding RNA (sncRNA) 5' transfer RNA (tRNA) half
actggcagtggtgggattcg

SEQ ID NO: 21886 - DNA, 17 bp, Artificial Sequence
  synthetic circulating small noncoding RNA (sncRNA) 5' transfer RNA (tRNA) half
cgttcaggtcgcagtct

SEQ ID NO: 21887 - DNA, 32 bp, Artificial Sequence
  synthetic circulating small noncoding RNA (sncRNA) 5' transfer RNA (tRNA) half
gtgcccggctagctcagtcggtagagcatgag

SEQ ID NO: 21888 - DNA, 18 bp, Artificial Sequence
  synthetic circulating small noncoding RNA (sncRNA) 5' transfer RNA (tRNA) half
atggataaggcactggcc

SEQ ID NO: 21889 - DNA, 38 bp, Artificial Sequence
  synthetic circulating small noncoding RNA (sncRNA) 5' transfer RNA (tRNA) half
ggccttgctgggattcgaacccaggatctcctgtttac

SEQ ID NO: 21890 - DNA, 23 bp, Artificial Sequence
  synthetic circulating small noncoding RNA (sncRNA) 5' transfer RNA (tRNA) half
aagtccagagtgctaaccattac

SEQ ID NO: 21891 - DNA, 15 bp, Artificial Sequence
  synthetic circulating small noncoding RNA (sncRNA) 5' transfer RNA (tRNA) half
tcaaatcccggacga

SEQ ID NO: 21892 - DNA, 12 bp, Artificial Sequence
  synthetic circulating small noncoding RNA (sncRNA) 5' transfer RNA (tRNA) half
aggttcgactcc

SEQ ID NO: 21893 - DNA, 31 bp, Artificial Sequence
  synthetic circulating small noncoding RNA (sncRNA) 5' transfer RNA (tRNA) half
accgagccagccaggagtcgaacctggaatc

SEQ ID NO: 21894 - DNA, 33 bp, Artificial Sequence
  synthetic circulating small noncoding RNA (sncRNA) 5' transfer RNA (tRNA) half
gaaggtcctgagttcgaacctcagagggggcag

SEQ ID NO: 21895 - DNA, 37 bp, Artificial Sequence
  synthetic circulating small noncoding RNA (sncRNA) 5' transfer RNA (tRNA) half
aatctgaaggtcctgagttcgaacctcagagggggca

SEQ ID NO: 21896 - DNA, 25 bp, Artificial Sequence
  synthetic circulating small noncoding RNA (sncRNA) 5' transfer RNA (tRNA) half
gcgtgtgaggcgaacgtgataacca

SEQ ID NO: 21897 - DNA, 6 bp, Artificial Sequence
  synthetic circulating small noncoding RNA (sncRNA) 5' transfer RNA (tRNA) half
cggtca

SEQ ID NO: 21898 - DNA, 14 bp, Artificial Sequence
  synthetic circulating small noncoding RNA (sncRNA) 5' transfer RNA (tRNA) half
acccgggtcacccg

SEQ ID NO: 21899 - DNA, 10 bp, Artificial Sequence
  synthetic circulating small noncoding RNA (sncRNA) 5' transfer RNA (tRNA) half
gagccggatt

SEQ ID NO: 21900 - DNA, 9 bp, Artificial Sequence
  synthetic circulating small noncoding RNA (sncRNA) 5' transfer RNA (tRNA) half
gcgagaatc

SEQ ID NO: 21901 - DNA, 32 bp, Artificial Sequence
  synthetic circulating small noncoding RNA (sncRNA) 5' transfer RNA (tRNA) half
gcggtagccgtttggagatgccggggatcgaa

SEQ ID NO: 21902 - DNA, 6 bp, Artificial Sequence
  synthetic circulating small noncoding RNA (sncRNA) 5' transfer RNA (tRNA) half
aaggcg

SEQ ID NO: 21903 - DNA, 21 bp, Artificial Sequence
  synthetic circulating small noncoding RNA (sncRNA) 5' transfer RNA (tRNA) half
tgtatgaggccccgggttcga

SEQ ID NO: 21904 - DNA, 34 bp, Artificial Sequence
  synthetic circulating small noncoding RNA (sncRNA) 5' transfer RNA (tRNA) half
ctcgagccaggtaggagtcgaacctacaatcttc

SEQ ID NO: 21905 - DNA, 12 bp, Artificial Sequence
  synthetic circulating small noncoding RNA (sncRNA) 5' transfer RNA (tRNA) half
ccgggcggcgca

SEQ ID NO: 21906 - DNA, 34 bp, Artificial Sequence
  synthetic circulating small noncoding RNA (sncRNA) 5' transfer RNA (tRNA) half
gccgcccgaacagggacttgaaccctggaccctc

SEQ ID NO: 21907 - DNA, 17 bp, Artificial Sequence
  synthetic circulating small noncoding RNA (sncRNA) 5' transfer RNA (tRNA) half
gaaggccccagcgagat

SEQ ID NO: 21908 - DNA, 20 bp, Artificial Sequence
  synthetic circulating small noncoding RNA (sncRNA) 5' transfer RNA (tRNA) half
acttttaatctgagggtcca

SEQ ID NO: 21909 - DNA, 10 bp, Artificial Sequence
  synthetic circulating small noncoding RNA (sncRNA) 5' transfer RNA (tRNA) half
gaaaccgggc

SEQ ID NO: 21910 - DNA, 14 bp, Artificial Sequence
  synthetic circulating small noncoding RNA (sncRNA) 5' transfer RNA (tRNA) half
ccggatgatcctca

SEQ ID NO: 21911 - DNA, 12 bp, Artificial Sequence
  synthetic circulating small noncoding RNA (sncRNA) 5' transfer RNA (tRNA) half
aatcgaaccccg

SEQ ID NO: 21912 - DNA, 24 bp, Artificial Sequence
  synthetic circulating small noncoding RNA (sncRNA) 5' transfer RNA (tRNA) half
ggttcgactccggctcgaaggaga

SEQ ID NO: 21913 - DNA, 9 bp, Artificial Sequence
  synthetic circulating small noncoding RNA (sncRNA) 5' transfer RNA (tRNA) half
gtcgaacct

SEQ ID NO: 21914 - DNA, 16 bp, Artificial Sequence
  synthetic circulating small noncoding RNA (sncRNA) 5' transfer RNA (tRNA) half
aaacccgggatcgaac

SEQ ID NO: 21915 - DNA, 13 bp, Artificial Sequence
  synthetic circulating small noncoding RNA (sncRNA) 5' transfer RNA (tRNA) half
tagcgcccgaaca

SEQ ID NO: 21916 - DNA, 24 bp, Artificial Sequence
  synthetic circulating small noncoding RNA (sncRNA) 5' transfer RNA (tRNA) half
cctgtcacgcgggagaccggggtt

SEQ ID NO: 21917 - DNA, 13 bp, Artificial Sequence
  synthetic circulating small noncoding RNA (sncRNA) 5' transfer RNA (tRNA) half
tctctgtggcgca

SEQ ID NO: 21918 - DNA, 43 bp, Artificial Sequence
  synthetic circulating small noncoding RNA (sncRNA) 5' transfer RNA (tRNA) half
aataaaatatatacgtacaccctctaacctagagaaggttatt

SEQ ID NO: 21919 - DNA, 9 bp, Artificial Sequence
  synthetic circulating small noncoding RNA (sncRNA) 5' transfer RNA (tRNA) half
ggctcgtcc

SEQ ID NO: 21920 - DNA, 13 bp, Artificial Sequence
  synthetic circulating small noncoding RNA (sncRNA) 5' transfer RNA (tRNA) half
cgactctggtggg

SEQ ID NO: 21921 - DNA, 34 bp, Artificial Sequence
  synthetic circulating small noncoding RNA (sncRNA) 5' transfer RNA (tRNA) half
caggggtcgcgagttcaaatctcgctggggcctg

SEQ ID NO: 21922 - DNA, 23 bp, Artificial Sequence
  synthetic circulating small noncoding RNA (sncRNA) 5' transfer RNA (tRNA) half
aggcccgggttcgattcccggcc

SEQ ID NO: 21923 - DNA, 16 bp, Artificial Sequence
  synthetic circulating small noncoding RNA (sncRNA) 5' transfer RNA (tRNA) half
tctagcggttaggatt

SEQ ID NO: 21924 - DNA, 14 bp, Artificial Sequence
  synthetic circulating small noncoding RNA (sncRNA) 5' transfer RNA (tRNA) half
tcccaccgctgcca

SEQ ID NO: 21925 - DNA, 39 bp, Artificial Sequence
  synthetic circulating small noncoding RNA (sncRNA) 5' transfer RNA (tRNA) half
ttaatctcagggtcgtgggttcgagccccacgttgggcg

SEQ ID NO: 21926 - DNA, 15 bp, Artificial Sequence
  synthetic circulating small noncoding RNA (sncRNA) 5' transfer RNA (tRNA) half
tctcttcggaggcgt

SEQ ID NO: 21927 - DNA, 20 bp, Artificial Sequence
  synthetic circulating small noncoding RNA (sncRNA) 5' transfer RNA (tRNA) half
gcgccacagagaccggtgat

SEQ ID NO: 21928 - DNA, 26 bp, Artificial Sequence
  synthetic circulating small noncoding RNA (sncRNA) 5' transfer RNA (tRNA) half
cccgcgtggcaggcgagaattctacc

SEQ ID NO: 21929 - DNA, 28 bp, Artificial Sequence
  synthetic circulating small noncoding RNA (sncRNA) 5' transfer RNA (tRNA) half
ctgggtgaaaaccaggaatcctaaccgc

SEQ ID NO: 21930 - DNA, 18 bp, Artificial Sequence
  synthetic circulating small noncoding RNA (sncRNA) 5' transfer RNA (tRNA) half
taggcgaatgtgataacc

SEQ ID NO: 21931 - DNA, 35 bp, Artificial Sequence
  synthetic circulating small noncoding RNA (sncRNA) 5' transfer RNA (tRNA) half
ctcaaccacgaagggattcgaaccctcaatcttct

SEQ ID NO: 21932 - DNA, 19 bp, Artificial Sequence
  synthetic circulating small noncoding RNA (sncRNA) 5' transfer RNA (tRNA) half
acctggaatcttctgatcc

SEQ ID NO: 21933 - DNA, 31 bp, Artificial Sequence
  synthetic circulating small noncoding RNA (sncRNA) 5' transfer RNA (tRNA) half
caagaattctaccactgaaccaccaatgctt

SEQ ID NO: 21934 - DNA, 32 bp, Artificial Sequence
  synthetic circulating small noncoding RNA (sncRNA) 5' transfer RNA (tRNA) half
tctggggtgcaggcttcaaacctgtagctgtt

SEQ ID NO: 21935 - DNA, 17 bp, Artificial Sequence
  synthetic circulating small noncoding RNA (sncRNA) 5' transfer RNA (tRNA) half
actcacgaccttcagat

SEQ ID NO: 21936 - DNA, 40 bp, Artificial Sequence
  synthetic circulating small noncoding RNA (sncRNA) 5' transfer RNA (tRNA) half
cgcctccccgtcggggaatcgaaccccggtctcccgcgtg

SEQ ID NO: 21937 - DNA, 44 bp, Artificial Sequence
  synthetic circulating small noncoding RNA (sncRNA) 5' transfer RNA (tRNA) half
ttttcacccaggcggcccgggttcgactcccggtatgggaacag

SEQ ID NO: 21938 - DNA, 31 bp, Artificial Sequence
  synthetic circulating small noncoding RNA (sncRNA) 5' transfer RNA (tRNA) half
gcggtgagagcgccgaatcctaaccactaga

SEQ ID NO: 21939 - DNA, 8 bp, Artificial Sequence
  synthetic circulating small noncoding RNA (sncRNA) 5' transfer RNA (tRNA) half
tccccgac

SEQ ID NO: 21940 - DNA, 13 bp, Artificial Sequence
  synthetic circulating small noncoding RNA (sncRNA) 5' transfer RNA (tRNA) half
gcccaacgtgagg

SEQ ID NO: 21941 - DNA, 19 bp, Artificial Sequence
  synthetic circulating small noncoding RNA (sncRNA) 5' transfer RNA (tRNA) half
cgaaccccggtctcccgcg

SEQ ID NO: 21942 - DNA, 23 bp, Artificial Sequence
  synthetic circulating small noncoding RNA (sncRNA) 5' transfer RNA (tRNA) half
aggcgaatgtgataaccactaca

SEQ ID NO: 21943 - DNA, 26 bp, Artificial Sequence
  synthetic circulating small noncoding RNA (sncRNA) 5' transfer RNA (tRNA) half
tccctggtggtctagtggctaggatt

SEQ ID NO: 21944 - DNA, 17 bp, Artificial Sequence
  synthetic circulating small noncoding RNA (sncRNA) 5' transfer RNA (tRNA) half
cgaatcccatcctcgtc

SEQ ID NO: 21945 - DNA, 21 bp, Artificial Sequence
  synthetic circulating small noncoding RNA (sncRNA) 5' transfer RNA (tRNA) half
agtcggtagagcatcagactt

SEQ ID NO: 21946 - DNA, 25 bp, Artificial Sequence
  synthetic circulating small noncoding RNA (sncRNA) 5' transfer RNA (tRNA) half
gaatcctaaccgctagaccatgtgg

SEQ ID NO: 21947 - DNA, 9 bp, Artificial Sequence
  synthetic circulating small noncoding RNA (sncRNA) 5' transfer RNA (tRNA) half
ctcggccat

SEQ ID NO: 21948 - DNA, 18 bp, Artificial Sequence
  synthetic circulating small noncoding RNA (sncRNA) 5' transfer RNA (tRNA) half
ttagcgacagagtggttc

SEQ ID NO: 21949 - DNA, 13 bp, Artificial Sequence
  synthetic circulating small noncoding RNA (sncRNA) 5' transfer RNA (tRNA) half
cggtgggattcga

SEQ ID NO: 21950 - DNA, 12 bp, Artificial Sequence
  synthetic circulating small noncoding RNA (sncRNA) 5' transfer RNA (tRNA) half
tgcgctctacca

SEQ ID NO: 21951 - DNA, 21 bp, Artificial Sequence
  synthetic circulating small noncoding RNA (sncRNA) 5' transfer RNA (tRNA) half
cactcggccatcctgacactt

SEQ ID NO: 21952 - DNA, 20 bp, Artificial Sequence
  synthetic circulating small noncoding RNA (sncRNA) 5' transfer RNA (tRNA) half
aaatcacgtcggggtcatct

SEQ ID NO: 21953 - DNA, 17 bp, Artificial Sequence
  synthetic circulating small noncoding RNA (sncRNA) 5' transfer RNA (tRNA) half
cgaatcccactcctgac

SEQ ID NO: 21954 - DNA, 30 bp, Artificial Sequence
  synthetic circulating small noncoding RNA (sncRNA) 5' transfer RNA (tRNA) half
ctcagtcggtagagcatgagactcttaatc

SEQ ID NO: 21955 - DNA, 37 bp, Artificial Sequence
  synthetic circulating small noncoding RNA (sncRNA) 5' transfer RNA (tRNA) half
aaggccccagcgagatttgaactcgcgacccctggtt

SEQ ID NO: 21956 - DNA, 20 bp, Artificial Sequence
  synthetic circulating small noncoding RNA (sncRNA) 5' transfer RNA (tRNA) half
cacgcgggaggcccgggttc

SEQ ID NO: 21957 - DNA, 36 bp, Artificial Sequence
  synthetic circulating small noncoding RNA (sncRNA) 5' transfer RNA (tRNA) half
atggtgtaatggttagcactctggactttgaatcca

SEQ ID NO: 21958 - DNA, 20 bp, Artificial Sequence
  synthetic circulating small noncoding RNA (sncRNA) 5' transfer RNA (tRNA) half
gttcgactcctggctggctc

SEQ ID NO: 21959 - DNA, 19 bp, Artificial Sequence
  synthetic circulating small noncoding RNA (sncRNA) 5' transfer RNA (tRNA) half
tctcatgctctaccaactg

SEQ ID NO: 21960 - DNA, 24 bp, Artificial Sequence
  synthetic circulating small noncoding RNA (sncRNA) 5' transfer RNA (tRNA) half
ctgggttcgatccccagcatctcc

SEQ ID NO: 21961 - DNA, 12 bp, Artificial Sequence
  synthetic circulating small noncoding RNA (sncRNA) 5' transfer RNA (tRNA) half
cgaacacgcagc

SEQ ID NO: 21962 - DNA, 26 bp, Artificial Sequence
  synthetic circulating small noncoding RNA (sncRNA) 5' transfer RNA (tRNA) half
taccgactgagctatccgggcgctct

SEQ ID NO: 21963 - DNA, 28 bp, Artificial Sequence
  synthetic circulating small noncoding RNA (sncRNA) 5' transfer RNA (tRNA) half
tcccgcgtgacaggcggggatactcacc

SEQ ID NO: 21964 - DNA, 23 bp, Artificial Sequence
  synthetic circulating small noncoding RNA (sncRNA) 5' transfer RNA (tRNA) half
accccgacgtgattcgaacacgc

SEQ ID NO: 21965 - DNA, 23 bp, Artificial Sequence
  synthetic circulating small noncoding RNA (sncRNA) 5' transfer RNA (tRNA) half
ttcgactcccggtgtgggaacgc

SEQ ID NO: 21966 - DNA, 8 bp, Artificial Sequence
  synthetic circulating small noncoding RNA (sncRNA) 5' transfer RNA (tRNA) half
atgcccgc

SEQ ID NO: 21967 - DNA, 20 bp, Artificial Sequence
  synthetic circulating small noncoding RNA (sncRNA) 5' transfer RNA (tRNA) half
ccgtagtgtagtggttatca

SEQ ID NO: 21968 - DNA, 16 bp, Artificial Sequence
  synthetic circulating small noncoding RNA (sncRNA) 5' transfer RNA (tRNA) half
cagcgccttagaccgc

SEQ ID NO: 21969 - DNA, 34 bp, Artificial Sequence
  synthetic circulating small noncoding RNA (sncRNA) 5' transfer RNA (tRNA) half
tgaccccgacgtgacttgaacacgcaaccttctg

SEQ ID NO: 21970 - DNA, 25 bp, Artificial Sequence
  synthetic circulating small noncoding RNA (sncRNA) 5' transfer RNA (tRNA) half
gggaatcgaacccgggccgcggcgg

SEQ ID NO: 21971 - DNA, 18 bp, Artificial Sequence
  synthetic circulating small noncoding RNA (sncRNA) 5' transfer RNA (tRNA) half
ccccgtcggggaattgaa

SEQ ID NO: 21972 - DNA, 28 bp, Artificial Sequence
  synthetic circulating small noncoding RNA (sncRNA) 5' transfer RNA (tRNA) half
gcctgggtgaaaaccaggaatcctaacc

SEQ ID NO: 21973 - DNA, 14 bp, Artificial Sequence
  synthetic circulating small noncoding RNA (sncRNA) 5' transfer RNA (tRNA) half
atcccccgaccgct

SEQ ID NO: 21974 - DNA, 16 bp, Artificial Sequence
  synthetic circulating small noncoding RNA (sncRNA) 5' transfer RNA (tRNA) half
agctgccgaaacccgg

SEQ ID NO: 21975 - DNA, 7 bp, Artificial Sequence
  synthetic circulating small noncoding RNA (sncRNA) 5' transfer RNA (tRNA) half
cgcgcta

SEQ ID NO: 21976 - DNA, 13 bp, Artificial Sequence
  synthetic circulating small noncoding RNA (sncRNA) 5' transfer RNA (tRNA) half
ctcagtcggtaga

SEQ ID NO: 21977 - DNA, 36 bp, Artificial Sequence
  synthetic circulating small noncoding RNA (sncRNA) 5' transfer RNA (tRNA) half
tcagaagattgagggttcgaatcccttcgtggttgg

SEQ ID NO: 21978 - DNA, 36 bp, Artificial Sequence
  synthetic circulating small noncoding RNA (sncRNA) 5' transfer RNA (tRNA) half
ctccccgcgcaggttcgaatcctgccgactacgtca

SEQ ID NO: 21979 - DNA, 18 bp, Artificial Sequence
  synthetic circulating small noncoding RNA (sncRNA) 5' transfer RNA (tRNA) half
cgcgtgacaggcggggat

SEQ ID NO: 21980 - DNA, 29 bp, Artificial Sequence
  synthetic circulating small noncoding RNA (sncRNA) 5' transfer RNA (tRNA) half
cccagcacgcttccgctgcgccactctgc

SEQ ID NO: 21981 - DNA, 30 bp, Artificial Sequence
  synthetic circulating small noncoding RNA (sncRNA) 5' transfer RNA (tRNA) half
gtgtgaggcgaacgtgataaccactacact

SEQ ID NO: 21982 - DNA, 5 bp, Artificial Sequence
  synthetic circulating small noncoding RNA (sncRNA) 5' transfer RNA (tRNA) half
ggcag

SEQ ID NO: 21983 - DNA, 45 bp, Artificial Sequence
  synthetic circulating small noncoding RNA (sncRNA) 5' transfer RNA (tRNA) half
agtctccccgtcggggaatcgaaccccggtctcccgcgtgacagg

SEQ ID NO: 21984 - DNA, 15 bp, Artificial Sequence
  synthetic circulating small noncoding RNA (sncRNA) 5' transfer RNA (tRNA) half
gtggtatcatgcaag

SEQ ID NO: 21985 - DNA, 24 bp, Artificial Sequence
  synthetic circulating small noncoding RNA (sncRNA) 5' transfer RNA (tRNA) half
ttcagtggtagaattctcgcctcc

SEQ ID NO: 21986 - DNA, 23 bp, Artificial Sequence
  synthetic circulating small noncoding RNA (sncRNA) 5' transfer RNA (tRNA) half
tagagcatcagacttttaatctg

SEQ ID NO: 21987 - DNA, 39 bp, Artificial Sequence
  synthetic circulating small noncoding RNA (sncRNA) 5' transfer RNA (tRNA) half
tctccccgtcggggaatcgaaccccggtctcccgcgtga

SEQ ID NO: 21988 - DNA, 18 bp, Artificial Sequence
  synthetic circulating small noncoding RNA (sncRNA) 5' transfer RNA (tRNA) half
ccgtcggggaatcgaacc

SEQ ID NO: 21989 - DNA, 28 bp, Artificial Sequence
  synthetic circulating small noncoding RNA (sncRNA) 5' transfer RNA (tRNA) half
aatccagcgccttagaccactcggccac

SEQ ID NO: 21990 - DNA, 45 bp, Artificial Sequence
  synthetic circulating small noncoding RNA (sncRNA) 5' transfer RNA (tRNA) half
cgctctcaccgccgcggcccgggttcgattcccggtcagggaagc

SEQ ID NO: 21991 - DNA, 14 bp, Artificial Sequence
  synthetic circulating small noncoding RNA (sncRNA) 5' transfer RNA (tRNA) half
aggcggcccgggtt

SEQ ID NO: 21992 - DNA, 22 bp, Artificial Sequence
  synthetic circulating small noncoding RNA (sncRNA) 5' transfer RNA (tRNA) half
tcaaatcccggacgagccctgt

SEQ ID NO: 21993 - DNA, 10 bp, Artificial Sequence
  synthetic circulating small noncoding RNA (sncRNA) 5' transfer RNA (tRNA) half
gccgttgcgt

SEQ ID NO: 21994 - DNA, 22 bp, Artificial Sequence
  synthetic circulating small noncoding RNA (sncRNA) 5' transfer RNA (tRNA) half
tactgcattggccgggaatcga

SEQ ID NO: 21995 - DNA, 13 bp, Artificial Sequence
  synthetic circulating small noncoding RNA (sncRNA) 5' transfer RNA (tRNA) half
gagaattctacca

SEQ ID NO: 21996 - DNA, 13 bp, Artificial Sequence
  synthetic circulating small noncoding RNA (sncRNA) 5' transfer RNA (tRNA) half
tcccggtgtggga

SEQ ID NO: 21997 - DNA, 34 bp, Artificial Sequence
  synthetic circulating small noncoding RNA (sncRNA) 5' transfer RNA (tRNA) half
gagcaccaaagcctaaccactagaccaccaggga

SEQ ID NO: 21998 - DNA, 11 bp, Artificial Sequence
  synthetic circulating small noncoding RNA (sncRNA) 5' transfer RNA (tRNA) half
gcgcgctaacc

SEQ ID NO: 21999 - DNA, 21 bp, Artificial Sequence
  synthetic circulating small noncoding RNA (sncRNA) 5' transfer RNA (tRNA) half
ggttcgaaccccgtccgtgcc

SEQ ID NO: 22000 - DNA, 22 bp, Artificial Sequence
  synthetic circulating small noncoding RNA (sncRNA) 5' transfer RNA (tRNA) half
caccgccgcggcccgggttcga

SEQ ID NO: 22001 - DNA, 14 bp, Artificial Sequence
  synthetic circulating small noncoding RNA (sncRNA) 5' transfer RNA (tRNA) half
aacctggcggaaac

SEQ ID NO: 22002 - DNA, 23 bp, Artificial Sequence
  synthetic circulating small noncoding RNA (sncRNA) 5' transfer RNA (tRNA) half
gaacctgcgcggggaaaccccaa

SEQ ID NO: 22003 - DNA, 12 bp, Artificial Sequence
  synthetic circulating small noncoding RNA (sncRNA) 5' transfer RNA (tRNA) half
gccgggagtcga

SEQ ID NO: 22004 - DNA, 23 bp, Artificial Sequence
  synthetic circulating small noncoding RNA (sncRNA) 5' transfer RNA (tRNA) half
tatggtctagcggttaggattcc

SEQ ID NO: 22005 - DNA, 15 bp, Artificial Sequence
  synthetic circulating small noncoding RNA (sncRNA) 5' transfer RNA (tRNA) half
ctgggttcgagtccc

SEQ ID NO: 22006 - DNA, 14 bp, Artificial Sequence
  synthetic circulating small noncoding RNA (sncRNA) 5' transfer RNA (tRNA) half
tccccgcctgtcac

SEQ ID NO: 22007 - DNA, 12 bp, Artificial Sequence
  synthetic circulating small noncoding RNA (sncRNA) 5' transfer RNA (tRNA) half
ggccaccgtgac

SEQ ID NO: 22008 - DNA, 17 bp, Artificial Sequence
  synthetic circulating small noncoding RNA (sncRNA) 5' transfer RNA (tRNA) half
cagaagattctaggttc

SEQ ID NO: 22009 - DNA, 27 bp, Artificial Sequence
  synthetic circulating small noncoding RNA (sncRNA) 5' transfer RNA (tRNA) half
tcctcgttagtatagtggtgagtatcc

SEQ ID NO: 22010 - DNA, 14 bp, Artificial Sequence
  synthetic circulating small noncoding RNA (sncRNA) 5' transfer RNA (tRNA) half
cgaacccacaatcc

SEQ ID NO: 22011 - DNA, 33 bp, Artificial Sequence
  synthetic circulating small noncoding RNA (sncRNA) 5' transfer RNA (tRNA) half
gccagccaggagtcgaacctggaatcttctgat

SEQ ID NO: 22012 - DNA, 36 bp, Artificial Sequence
  synthetic circulating small noncoding RNA (sncRNA) 5' transfer RNA (tRNA) half
gccttgctgggattcgaacccaggatctcctgttta

SEQ ID NO: 22013 - DNA, 12 bp, Artificial Sequence
  synthetic circulating small noncoding RNA (sncRNA) 5' transfer RNA (tRNA) half
cgggttcaaatc

SEQ ID NO: 22014 - DNA, 21 bp, Artificial Sequence
  synthetic circulating small noncoding RNA (sncRNA) 5' transfer RNA (tRNA) half
aaaatgctaaggttccaccga

SEQ ID NO: 22015 - DNA, 19 bp, Artificial Sequence
  synthetic circulating small noncoding RNA (sncRNA) 5' transfer RNA (tRNA) half
ttcgatccccggcacctcc

SEQ ID NO: 22016 - DNA, 21 bp, Artificial Sequence
  synthetic circulating small noncoding RNA (sncRNA) 5' transfer RNA (tRNA) half
cgcggcggtgagagcgccgaa

SEQ ID NO: 22017 - DNA, 21 bp, Artificial Sequence
  synthetic circulating small noncoding RNA (sncRNA) 5' transfer RNA (tRNA) half
tcaaatggtagagcgctcgct

SEQ ID NO: 22018 - DNA, 17 bp, Artificial Sequence
  synthetic circulating small noncoding RNA (sncRNA) 5' transfer RNA (tRNA) half
agacgacgaaggtggga

SEQ ID NO: 22019 - DNA, 21 bp, Artificial Sequence
  synthetic circulating small noncoding RNA (sncRNA) 5' transfer RNA (tRNA) half
gttcgattcccggtcagggaa

SEQ ID NO: 22020 - DNA, 33 bp, Artificial Sequence
  synthetic circulating small noncoding RNA (sncRNA) 5' transfer RNA (tRNA) half
cgggacctctcgcacccaaagcgagaatcatac

SEQ ID NO: 22021 - DNA, 20 bp, Artificial Sequence
  synthetic circulating small noncoding RNA (sncRNA) 5' transfer RNA (tRNA) half
cggatcagaagattgcaggt

SEQ ID NO: 22022 - DNA, 14 bp, Artificial Sequence
  synthetic circulating small noncoding RNA (sncRNA) 5' transfer RNA (tRNA) half
cagagaccggtgat

SEQ ID NO: 22023 - DNA, 13 bp, Artificial Sequence
  synthetic circulating small noncoding RNA (sncRNA) 5' transfer RNA (tRNA) half
cgtgacaggcggg

SEQ ID NO: 22024 - DNA, 40 bp, Artificial Sequence
  synthetic circulating small noncoding RNA (sncRNA) 5' transfer RNA (tRNA) half
tttgaactcggatcgctggattcagagtccagagtgctaa

SEQ ID NO: 22025 - DNA, 19 bp, Artificial Sequence
  synthetic circulating small noncoding RNA (sncRNA) 5' transfer RNA (tRNA) half
gttcgaatccgagtcacgg

SEQ ID NO: 22026 - DNA, 30 bp, Artificial Sequence
  synthetic circulating small noncoding RNA (sncRNA) 5' transfer RNA (tRNA) half
atgcgctatccattgcgccacagagccaca

SEQ ID NO: 22027 - DNA, 20 bp, Artificial Sequence
  synthetic circulating small noncoding RNA (sncRNA) 5' transfer RNA (tRNA) half
agcgaccacgaagggactcg

SEQ ID NO: 22028 - DNA, 30 bp, Artificial Sequence
  synthetic circulating small noncoding RNA (sncRNA) 5' transfer RNA (tRNA) half
tggtgtaatggttagcactctggactctga

SEQ ID NO: 22029 - DNA, 15 bp, Artificial Sequence
  synthetic circulating small noncoding RNA (sncRNA) 5' transfer RNA (tRNA) half
aggagtgggattcga

SEQ ID NO: 22030 - DNA, 34 bp, Artificial Sequence
  synthetic circulating small noncoding RNA (sncRNA) 5' transfer RNA (tRNA) half
acgcagaaggtcctgggttcgagccccagtggaa

SEQ ID NO: 22031 - DNA, 16 bp, Artificial Sequence
  synthetic circulating small noncoding RNA (sncRNA) 5' transfer RNA (tRNA) half
gggttccttcgagccg

SEQ ID NO: 22032 - DNA, 17 bp, Artificial Sequence
  synthetic circulating small noncoding RNA (sncRNA) 5' transfer RNA (tRNA) half
gatcgctggattcagag

SEQ ID NO: 22033 - DNA, 22 bp, Artificial Sequence
  synthetic circulating small noncoding RNA (sncRNA) 5' transfer RNA (tRNA) half
gttcaatccccggcacctccag

SEQ ID NO: 22034 - DNA, 26 bp, Artificial Sequence
  synthetic circulating small noncoding RNA (sncRNA) 5' transfer RNA (tRNA) half
aaatcccggacgagcccaagcatttt

SEQ ID NO: 22035 - DNA, 29 bp, Artificial Sequence
  synthetic circulating small noncoding RNA (sncRNA) 5' transfer RNA (tRNA) half
aggatcgaactcacgaccttcagattatg

SEQ ID NO: 22036 - DNA, 16 bp, Artificial Sequence
  synthetic circulating small noncoding RNA (sncRNA) 5' transfer RNA (tRNA) half
agcgactctggtggga

SEQ ID NO: 22037 - DNA, 13 bp, Artificial Sequence
  synthetic circulating small noncoding RNA (sncRNA) 5' transfer RNA (tRNA) half
ccccgaagagact

SEQ ID NO: 22038 - DNA, 13 bp, Artificial Sequence
  synthetic circulating small noncoding RNA (sncRNA) 5' transfer RNA (tRNA) half
attccccgacggg

SEQ ID NO: 22039 - DNA, 33 bp, Artificial Sequence
  synthetic circulating small noncoding RNA (sncRNA) 5' transfer RNA (tRNA) half
gcgtccctgggtgggctcgaaccaccaaccttt

SEQ ID NO: 22040 - DNA, 40 bp, Artificial Sequence
  synthetic circulating small noncoding RNA (sncRNA) 5' transfer RNA (tRNA) half
gttaggattcggcgctctcaccgccgcggcccgggttcga

SEQ ID NO: 22041 - DNA, 16 bp, Artificial Sequence
  synthetic circulating small noncoding RNA (sncRNA) 5' transfer RNA (tRNA) half
ggccgcggcggtgaaa

SEQ ID NO: 22042 - DNA, 15 bp, Artificial Sequence
  synthetic circulating small noncoding RNA (sncRNA) 5' transfer RNA (tRNA) half
tcacgtcggggtcat

SEQ ID NO: 22043 - DNA, 29 bp, Artificial Sequence
  synthetic circulating small noncoding RNA (sncRNA) 5' transfer RNA (tRNA) half
ctatagctcaggggttagagcactggtct

SEQ ID NO: 22044 - DNA, 15 bp, Artificial Sequence
  synthetic circulating small noncoding RNA (sncRNA) 5' transfer RNA (tRNA) half
cgggccgcctgggtg

SEQ ID NO: 22045 - DNA, 14 bp, Artificial Sequence
  synthetic circulating small noncoding RNA (sncRNA) 5' transfer RNA (tRNA) half
tagtcggcaggatt

SEQ ID NO: 22046 - DNA, 11 bp, Artificial Sequence
  synthetic circulating small noncoding RNA (sncRNA) 5' transfer RNA (tRNA) half
acccgcaacct

SEQ ID NO: 22047 - DNA, 14 bp, Artificial Sequence
  synthetic circulating small noncoding RNA (sncRNA) 5' transfer RNA (tRNA) half
tttccgcccggttt

SEQ ID NO: 22048 - DNA, 33 bp, Artificial Sequence
  synthetic circulating small noncoding RNA (sncRNA) 5' transfer RNA (tRNA) half
ggacctctcgcacccgaagcgagaatcataccc

SEQ ID NO: 22049 - DNA, 28 bp, Artificial Sequence
  synthetic circulating small noncoding RNA (sncRNA) 5' transfer RNA (tRNA) half
gctggattcaaagtccagagtgctaacc

SEQ ID NO: 22050 - DNA, 42 bp, Artificial Sequence
  synthetic circulating small noncoding RNA (sncRNA) 5' transfer RNA (tRNA) half
ttccctgaccgggaatcgaacccgggccgcggcggtgagagc

SEQ ID NO: 22051 - DNA, 12 bp, Artificial Sequence
  synthetic circulating small noncoding RNA (sncRNA) 5' transfer RNA (tRNA) half
agccgcccgaac

SEQ ID NO: 22052 - DNA, 16 bp, Artificial Sequence
  synthetic circulating small noncoding RNA (sncRNA) 5' transfer RNA (tRNA) half
aatctgaaggtcctga

SEQ ID NO: 22053 - DNA, 12 bp, Artificial Sequence
  synthetic circulating small noncoding RNA (sncRNA) 5' transfer RNA (tRNA) half
gaccacgaaggg

SEQ ID NO: 22054 - DNA, 29 bp, Artificial Sequence
  synthetic circulating small noncoding RNA (sncRNA) 5' transfer RNA (tRNA) half
tcgctggttcgactccggctcgaaggaga

SEQ ID NO: 22055 - DNA, 38 bp, Artificial Sequence
  synthetic circulating small noncoding RNA (sncRNA) 5' transfer RNA (tRNA) half
atcagaaggttgcgtgttcaaatcacgtcggggtcatc

SEQ ID NO: 22056 - DNA, 11 bp, Artificial Sequence
  synthetic circulating small noncoding RNA (sncRNA) 5' transfer RNA (tRNA) half
gcgttatccat

SEQ ID NO: 22057 - DNA, 34 bp, Artificial Sequence
  synthetic circulating small noncoding RNA (sncRNA) 5' transfer RNA (tRNA) half
ctggggattgtgggttcgagtcccatctgggtcg

SEQ ID NO: 22058 - DNA, 32 bp, Artificial Sequence
  synthetic circulating small noncoding RNA (sncRNA) 5' transfer RNA (tRNA) half
cccgtacggggatcgaacccgcgaccttggcg

SEQ ID NO: 22059 - DNA, 14 bp, Artificial Sequence
  synthetic circulating small noncoding RNA (sncRNA) 5' transfer RNA (tRNA) half
tcgcagtctcccct

SEQ ID NO: 22060 - DNA, 19 bp, Artificial Sequence
  synthetic circulating small noncoding RNA (sncRNA) 5' transfer RNA (tRNA) half
ccgctggtgtagtggtatc

SEQ ID NO: 22061 - DNA, 22 bp, Artificial Sequence
  synthetic circulating small noncoding RNA (sncRNA) 5' transfer RNA (tRNA) half
aggcaagaattctaccactgaa

SEQ ID NO: 22062 - DNA, 44 bp, Artificial Sequence
  synthetic circulating small noncoding RNA (sncRNA) 5' transfer RNA (tRNA) half
cggctgttaaccgaaaggttggtggttcgagcccacccagggac

SEQ ID NO: 22063 - DNA, 25 bp, Artificial Sequence
  synthetic circulating small noncoding RNA (sncRNA) 5' transfer RNA (tRNA) half
tcacgaccttcagattatgagactg

SEQ ID NO: 22064 - DNA, 26 bp, Artificial Sequence
  synthetic circulating small noncoding RNA (sncRNA) 5' transfer RNA (tRNA) half
tagtggttatcacgttcgcctcacac

SEQ ID NO: 22065 - DNA, 8 bp, Artificial Sequence
  synthetic circulating small noncoding RNA (sncRNA) 5' transfer RNA (tRNA) half
cgccgtgg

SEQ ID NO: 22066 - DNA, 33 bp, Artificial Sequence
  synthetic circulating small noncoding RNA (sncRNA) 5' transfer RNA (tRNA) half
gtggaggcgtgggttcgaatcccacttctgaca

SEQ ID NO: 22067 - DNA, 22 bp, Artificial Sequence
  synthetic circulating small noncoding RNA (sncRNA) 5' transfer RNA (tRNA) half
cggcggtgagagcgccgaatcc

SEQ ID NO: 22068 - DNA, 16 bp, Artificial Sequence
  synthetic circulating small noncoding RNA (sncRNA) 5' transfer RNA (tRNA) half
gaacccaggaccccat

SEQ ID NO: 22069 - DNA, 23 bp, Artificial Sequence
  synthetic circulating small noncoding RNA (sncRNA) 5' transfer RNA (tRNA) half
atcggggaatcgaaccccggtct

SEQ ID NO: 22070 - DNA, 15 bp, Artificial Sequence
  synthetic circulating small noncoding RNA (sncRNA) 5' transfer RNA (tRNA) half
gtcccatctgggtcg

SEQ ID NO: 22071 - DNA, 18 bp, Artificial Sequence
  synthetic circulating small noncoding RNA (sncRNA) 5' transfer RNA (tRNA) half
cggcccgggttcgattcc

SEQ ID NO: 22072 - DNA, 18 bp, Artificial Sequence
  synthetic circulating small noncoding RNA (sncRNA) 5' transfer RNA (tRNA) half
ccgctgcgccactctgct

SEQ ID NO: 22073 - DNA, 32 bp, Artificial Sequence
  synthetic circulating small noncoding RNA (sncRNA) 5' transfer RNA (tRNA) half
cagcgatccgagttcaaatctcggtggaacct

SEQ ID NO: 22074 - DNA, 20 bp, Artificial Sequence
  synthetic circulating small noncoding RNA (sncRNA) 5' transfer RNA (tRNA) half
gcattggtggttcaatggta

SEQ ID NO: 22075 - DNA, 22 bp, Artificial Sequence
  synthetic circulating small noncoding RNA (sncRNA) 5' transfer RNA (tRNA) half
ttaaccactcggccaccgtgac

SEQ ID NO: 22076 - DNA, 12 bp, Artificial Sequence
  synthetic circulating small noncoding RNA (sncRNA) 5' transfer RNA (tRNA) half
gcgcaggttcga

SEQ ID NO: 22077 - DNA, 36 bp, Artificial Sequence
  synthetic circulating small noncoding RNA (sncRNA) 5' transfer RNA (tRNA) half
cgccgaatcctaaccactagaccaccagggagcgtc

SEQ ID NO: 22078 - DNA, 11 bp, Artificial Sequence
  synthetic circulating small noncoding RNA (sncRNA) 5' transfer RNA (tRNA) half
ccaaagcgaga

SEQ ID NO: 22079 - DNA, 14 bp, Artificial Sequence
  synthetic circulating small noncoding RNA (sncRNA) 5' transfer RNA (tRNA) half
ccgtccgtgcctgc

SEQ ID NO: 22080 - DNA, 28 bp, Artificial Sequence
  synthetic circulating small noncoding RNA (sncRNA) 5' transfer RNA (tRNA) half
cacaacgcagagtactaaccactatacg

SEQ ID NO: 22081 - DNA, 30 bp, Artificial Sequence
  synthetic circulating small noncoding RNA (sncRNA) 5' transfer RNA (tRNA) half
gtggtctggggtgcaggcttcaaacctgta

SEQ ID NO: 22082 - DNA, 19 bp, Artificial Sequence
  synthetic circulating small noncoding RNA (sncRNA) 5' transfer RNA (tRNA) half
gtcgtggccgagtggttaa

SEQ ID NO: 22083 - DNA, 18 bp, Artificial Sequence
  synthetic circulating small noncoding RNA (sncRNA) 5' transfer RNA (tRNA) half
gaacccacaatccctggc

SEQ ID NO: 22084 - DNA, 12 bp, Artificial Sequence
  synthetic circulating small noncoding RNA (sncRNA) 5' transfer RNA (tRNA) half
gcctccccgtcg

SEQ ID NO: 22085 - DNA, 30 bp, Artificial Sequence
  synthetic circulating small noncoding RNA (sncRNA) 5' transfer RNA (tRNA) half
ctcggatcgctggattcaaagtccagagtg

SEQ ID NO: 22086 - DNA, 18 bp, Artificial Sequence
  synthetic circulating small noncoding RNA (sncRNA) 5' transfer RNA (tRNA) half
cgaaccccgtccgtgcct

SEQ ID NO: 22087 - DNA, 15 bp, Artificial Sequence
  synthetic circulating small noncoding RNA (sncRNA) 5' transfer RNA (tRNA) half
gcgagaggtagcggg

SEQ ID NO: 22088 - DNA, 10 bp, Artificial Sequence
  synthetic circulating small noncoding RNA (sncRNA) 5' transfer RNA (tRNA) half
acgtcggggt

SEQ ID NO: 22089 - DNA, 29 bp, Artificial Sequence
  synthetic circulating small noncoding RNA (sncRNA) 5' transfer RNA (tRNA) half
ccgctgggattcgaacccaggatctcctg

SEQ ID NO: 22090 - DNA, 10 bp, Artificial Sequence
  synthetic circulating small noncoding RNA (sncRNA) 5' transfer RNA (tRNA) half
caccgagatt

SEQ ID NO: 22091 - DNA, 18 bp, Artificial Sequence
  synthetic circulating small noncoding RNA (sncRNA) 5' transfer RNA (tRNA) half
tgggattcgaacccacgc

SEQ ID NO: 22092 - DNA, 21 bp, Artificial Sequence
  synthetic circulating small noncoding RNA (sncRNA) 5' transfer RNA (tRNA) half
gcattggtggttcagtggtag

SEQ ID NO: 22093 - DNA, 36 bp, Artificial Sequence
  synthetic circulating small noncoding RNA (sncRNA) 5' transfer RNA (tRNA) half
gctgtcagaagtgggattcgaacccacgcctccagg

SEQ ID NO: 22094 - DNA, 21 bp, Artificial Sequence
  synthetic circulating small noncoding RNA (sncRNA) 5' transfer RNA (tRNA) half
tccttcgagccggattcgaac

SEQ ID NO: 22095 - DNA, 11 bp, Artificial Sequence
  synthetic circulating small noncoding RNA (sncRNA) 5' transfer RNA (tRNA) half
gagcgtcggcc

SEQ ID NO: 22096 - DNA, 19 bp, Artificial Sequence
  synthetic circulating small noncoding RNA (sncRNA) 5' transfer RNA (tRNA) half
ctccttcgagccggattcg

SEQ ID NO: 22097 - DNA, 20 bp, Artificial Sequence
  synthetic circulating small noncoding RNA (sncRNA) 5' transfer RNA (tRNA) half
agaattctcgcctgccacgc

SEQ ID NO: 22098 - DNA, 22 bp, Artificial Sequence
  synthetic circulating small noncoding RNA (sncRNA) 5' transfer RNA (tRNA) half
tagactgctcggccatcctgac

SEQ ID NO: 22099 - DNA, 24 bp, Artificial Sequence
  synthetic circulating small noncoding RNA (sncRNA) 5' transfer RNA (tRNA) half
actatacgatcacggcgagccacc

SEQ ID NO: 22100 - DNA, 24 bp, Artificial Sequence
  synthetic circulating small noncoding RNA (sncRNA) 5' transfer RNA (tRNA) half
cacatggtctagcggttaggattc

SEQ ID NO: 22101 - DNA, 32 bp, Artificial Sequence
  synthetic circulating small noncoding RNA (sncRNA) 5' transfer RNA (tRNA) half
ggttggtggttcgagcccacccagggacgaca

SEQ ID NO: 22102 - DNA, 21 bp, Artificial Sequence
  synthetic circulating small noncoding RNA (sncRNA) 5' transfer RNA (tRNA) half
agcggaagcgtgctgggccca

SEQ ID NO: 22103 - DNA, 26 bp, Artificial Sequence
  synthetic circulating small noncoding RNA (sncRNA) 5' transfer RNA (tRNA) half
ttaaccgaaaggttggtggttcgagc

SEQ ID NO: 22104 - DNA, 18 bp, Artificial Sequence
  synthetic circulating small noncoding RNA (sncRNA) 5' transfer RNA (tRNA) half
ggttcgactcccggtatg

SEQ ID NO: 22105 - DNA, 13 bp, Artificial Sequence
  synthetic circulating small noncoding RNA (sncRNA) 5' transfer RNA (tRNA) half
ggagtcgaaccta

SEQ ID NO: 22106 - DNA, 41 bp, Artificial Sequence
  synthetic circulating small noncoding RNA (sncRNA) 5' transfer RNA (tRNA) half
gaactcggatcgctggattcagagtccagagtgctagccat

SEQ ID NO: 22107 - DNA, 19 bp, Artificial Sequence
  synthetic circulating small noncoding RNA (sncRNA) 5' transfer RNA (tRNA) half
gtgtttccgcccggtttcg

SEQ ID NO: 22108 - DNA, 32 bp, Artificial Sequence
  synthetic circulating small noncoding RNA (sncRNA) 5' transfer RNA (tRNA) half
ggccgcgtggcctaatggataaggcgtctgac

SEQ ID NO: 22109 - DNA, 12 bp, Artificial Sequence
  synthetic circulating small noncoding RNA (sncRNA) 5' transfer RNA (tRNA) half
ctggcccgtacg

SEQ ID NO: 22110 - DNA, 14 bp, Artificial Sequence
  synthetic circulating small noncoding RNA (sncRNA) 5' transfer RNA (tRNA) half
cgggcagcgctggt

SEQ ID NO: 22111 - DNA, 34 bp, Artificial Sequence
  synthetic circulating small noncoding RNA (sncRNA) 5' transfer RNA (tRNA) half
aggcgaatgtgataaccactacactacggaaaca

SEQ ID NO: 22112 - DNA, 32 bp, Artificial Sequence
  synthetic circulating small noncoding RNA (sncRNA) 5' transfer RNA (tRNA) half
ccctggtagtctagtggttaggattcggtgct

SEQ ID NO: 22113 - DNA, 31 bp, Artificial Sequence
  synthetic circulating small noncoding RNA (sncRNA) 5' transfer RNA (tRNA) half
aggcgagaattctaccattgaaccaccaatg

SEQ ID NO: 22114 - DNA, 16 bp, Artificial Sequence
  synthetic circulating small noncoding RNA (sncRNA) 5' transfer RNA (tRNA) half
gcttccgctgcgccac

SEQ ID NO: 22115 - DNA, 8 bp, Artificial Sequence
  synthetic circulating small noncoding RNA (sncRNA) 5' transfer RNA (tRNA) half
cgcccggt

SEQ ID NO: 22116 - DNA, 13 bp, Artificial Sequence
  synthetic circulating small noncoding RNA (sncRNA) 5' transfer RNA (tRNA) half
gtgccccgtgtga

SEQ ID NO: 22117 - DNA, 10 bp, Artificial Sequence
  synthetic circulating small noncoding RNA (sncRNA) 5' transfer RNA (tRNA) half
agcccaagca

SEQ ID NO: 22118 - DNA, 36 bp, Artificial Sequence
  synthetic circulating small noncoding RNA (sncRNA) 5' transfer RNA (tRNA) half
atggaggcgtgggttcgaatcccacttctgacacag

SEQ ID NO: 22119 - DNA, 29 bp, Artificial Sequence
  synthetic circulating small noncoding RNA (sncRNA) 5' transfer RNA (tRNA) half
cccgacgtgacttgaacacgcaaccttct

SEQ ID NO: 22120 - DNA, 36 bp, Artificial Sequence
  synthetic circulating small noncoding RNA (sncRNA) 5' transfer RNA (tRNA) half
accccggtctcccgcgtgacaggcggggatactcac

SEQ ID NO: 22121 - DNA, 27 bp, Artificial Sequence
  synthetic circulating small noncoding RNA (sncRNA) 5' transfer RNA (tRNA) half
ctcccgcgtggcaggcgagaattctac

SEQ ID NO: 22122 - DNA, 22 bp, Artificial Sequence
  synthetic circulating small noncoding RNA (sncRNA) 5' transfer RNA (tRNA) half
cgcctccaggggagactgcgac

SEQ ID NO: 22123 - DNA, 17 bp, Artificial Sequence
  synthetic circulating small noncoding RNA (sncRNA) 5' transfer RNA (tRNA) half
ttggccgggaatcgaac

SEQ ID NO: 22124 - DNA, 15 bp, Artificial Sequence
  synthetic circulating small noncoding RNA (sncRNA) 5' transfer RNA (tRNA) half
gccgcggcggtgaaa

SEQ ID NO: 22125 - DNA, 19 bp, Artificial Sequence
  synthetic circulating small noncoding RNA (sncRNA) 5' transfer RNA (tRNA) half
ggtgtaatggttagcactc

SEQ ID NO: 22126 - DNA, 21 bp, Artificial Sequence
  synthetic circulating small noncoding RNA (sncRNA) 5' transfer RNA (tRNA) half
tggattcaaagtccagagtgc

SEQ ID NO: 22127 - DNA, 36 bp, Artificial Sequence
  synthetic circulating small noncoding RNA (sncRNA) 5' transfer RNA (tRNA) half
ttccccgcgcaggttcgaatcctgccgactacgtga

SEQ ID NO: 22128 - DNA, 27 bp, Artificial Sequence
  synthetic circulating small noncoding RNA (sncRNA) 5' transfer RNA (tRNA) half
gaagcgagaatcatacccctagaccaa

SEQ ID NO: 22129 - DNA, 21 bp, Artificial Sequence
  synthetic circulating small noncoding RNA (sncRNA) 5' transfer RNA (tRNA) half
aaaaagttaccatgcgcccaa

SEQ ID NO: 22130 - DNA, 33 bp, Artificial Sequence
  synthetic circulating small noncoding RNA (sncRNA) 5' transfer RNA (tRNA) half
cagtcaaatgctctacccctgagctataccacc

SEQ ID NO: 22131 - DNA, 20 bp, Artificial Sequence
  synthetic circulating small noncoding RNA (sncRNA) 5' transfer RNA (tRNA) half
tagaattctcgcctcccact

SEQ ID NO: 22132 - DNA, 37 bp, Artificial Sequence
  synthetic circulating small noncoding RNA (sncRNA) 5' transfer RNA (tRNA) half
agaccagtgctctaacccctgagctatggagccctca

SEQ ID NO: 22133 - DNA, 15 bp, Artificial Sequence
  synthetic circulating small noncoding RNA (sncRNA) 5' transfer RNA (tRNA) half
cgccaaatcctaacc

SEQ ID NO: 22134 - DNA, 16 bp, Artificial Sequence
  synthetic circulating small noncoding RNA (sncRNA) 5' transfer RNA (tRNA) half
gccggattcgaaccag

SEQ ID NO: 22135 - DNA, 34 bp, Artificial Sequence
  synthetic circulating small noncoding RNA (sncRNA) 5' transfer RNA (tRNA) half
ttagcactctggactctgaatccagcgatccgag

SEQ ID NO: 22136 - DNA, 16 bp, Artificial Sequence
  synthetic circulating small noncoding RNA (sncRNA) 5' transfer RNA (tRNA) half
caaggttgtgggttcg

SEQ ID NO: 22137 - DNA, 35 bp, Artificial Sequence
  synthetic circulating small noncoding RNA (sncRNA) 5' transfer RNA (tRNA) half
ggtcgagccagccaggagtcgaacctagaatcttc

SEQ ID NO: 22138 - DNA, 35 bp, Artificial Sequence
  synthetic circulating small noncoding RNA (sncRNA) 5' transfer RNA (tRNA) half
gtctaacgctctcccaactgagctatttcggcggc

SEQ ID NO: 22139 - DNA, 27 bp, Artificial Sequence
  synthetic circulating small noncoding RNA (sncRNA) 5' transfer RNA (tRNA) half
attcagagtccagagtgctaaccatta

SEQ ID NO: 22140 - DNA, 18 bp, Artificial Sequence
  synthetic circulating small noncoding RNA (sncRNA) 5' transfer RNA (tRNA) half
gcgtgctgggcccataac

SEQ ID NO: 22141 - DNA, 19 bp, Artificial Sequence
  synthetic circulating small noncoding RNA (sncRNA) 5' transfer RNA (tRNA) half
catggtctagcggttagga

SEQ ID NO: 22142 - DNA, 16 bp, Artificial Sequence
  synthetic circulating small noncoding RNA (sncRNA) 5' transfer RNA (tRNA) half
acgcccccgaagagac

SEQ ID NO: 22143 - DNA, 17 bp, Artificial Sequence
  synthetic circulating small noncoding RNA (sncRNA) 5' transfer RNA (tRNA) half
gactcctggctggctcg

SEQ ID NO: 22144 - DNA, 15 bp, Artificial Sequence
  synthetic circulating small noncoding RNA (sncRNA) 5' transfer RNA (tRNA) half
ctcaggggtagagca

SEQ ID NO: 22145 - DNA, 18 bp, Artificial Sequence
  synthetic circulating small noncoding RNA (sncRNA) 5' transfer RNA (tRNA) half
accactatacgatcacgg

SEQ ID NO: 22146 - DNA, 14 bp, Artificial Sequence
  synthetic circulating small noncoding RNA (sncRNA) 5' transfer RNA (tRNA) half
ttcgcctcacacgc

SEQ ID NO: 22147 - DNA, 33 bp, Artificial Sequence
  synthetic circulating small noncoding RNA (sncRNA) 5' transfer RNA (tRNA) half
ccatatggtctagcggttaggattcctggtttt

SEQ ID NO: 22148 - DNA, 20 bp, Artificial Sequence
  synthetic circulating small noncoding RNA (sncRNA) 5' transfer RNA (tRNA) half
ggtttcgatccatcgacctc

SEQ ID NO: 22149 - DNA, 14 bp, Artificial Sequence
  synthetic circulating small noncoding RNA (sncRNA) 5' transfer RNA (tRNA) half
gattcccggccaac

SEQ ID NO: 22150 - DNA, 13 bp, Artificial Sequence
  synthetic circulating small noncoding RNA (sncRNA) 5' transfer RNA (tRNA) half
tgtagcggttatc

SEQ ID NO: 22151 - DNA, 34 bp, Artificial Sequence
  synthetic circulating small noncoding RNA (sncRNA) 5' transfer RNA (tRNA) half
ggttgccccctctgaggttcgaactcaggacctt

SEQ ID NO: 22152 - DNA, 30 bp, Artificial Sequence
  synthetic circulating small noncoding RNA (sncRNA) 5' transfer RNA (tRNA) half
ccgaatcctagccactagaccaccagggac

SEQ ID NO: 22153 - DNA, 16 bp, Artificial Sequence
  synthetic circulating small noncoding RNA (sncRNA) 5' transfer RNA (tRNA) half
gatagctcagtcggta

SEQ ID NO: 22154 - DNA, 24 bp, Artificial Sequence
  synthetic circulating small noncoding RNA (sncRNA) 5' transfer RNA (tRNA) half
agtactaaccactatacgatctcg

SEQ ID NO: 22155 - DNA, 11 bp, Artificial Sequence
  synthetic circulating small noncoding RNA (sncRNA) 5' transfer RNA (tRNA) half
gttcgaatccc

SEQ ID NO: 22156 - DNA, 28 bp, Artificial Sequence
  synthetic circulating small noncoding RNA (sncRNA) 5' transfer RNA (tRNA) half
agtctccccgtcggggaatcgaaccccg

SEQ ID NO: 22157 - DNA, 34 bp, Artificial Sequence
  synthetic circulating small noncoding RNA (sncRNA) 5' transfer RNA (tRNA) half
tatgaccccgacgtgattcgaacacgcagccttc

SEQ ID NO: 22158 - DNA, 13 bp, Artificial Sequence
  synthetic circulating small noncoding RNA (sncRNA) 5' transfer RNA (tRNA) half
agaagacatcctt

SEQ ID NO: 22159 - DNA, 18 bp, Artificial Sequence
  synthetic circulating small noncoding RNA (sncRNA) 5' transfer RNA (tRNA) half
agaatcatacccctagac

SEQ ID NO: 22160 - DNA, 9 bp, Artificial Sequence
  synthetic circulating small noncoding RNA (sncRNA) 5' transfer RNA (tRNA) half
gtttccccg

SEQ ID NO: 22161 - DNA, 11 bp, Artificial Sequence
  synthetic circulating small noncoding RNA (sncRNA) 5' transfer RNA (tRNA) half
gagtgctaacc

SEQ ID NO: 22162 - DNA, 19 bp, Artificial Sequence
  synthetic circulating small noncoding RNA (sncRNA) 5' transfer RNA (tRNA) half
gggttcgactcccggtatg

SEQ ID NO: 22163 - DNA, 28 bp, Artificial Sequence
  synthetic circulating small noncoding RNA (sncRNA) 5' transfer RNA (tRNA) half
gattaagagtctcatgctctaccgactg

SEQ ID NO: 22164 - DNA, 31 bp, Artificial Sequence
  synthetic circulating small noncoding RNA (sncRNA) 5' transfer RNA (tRNA) half
gaggtccccggttcgaaaccgggcagaaaca

SEQ ID NO: 22165 - DNA, 16 bp, Artificial Sequence
  synthetic circulating small noncoding RNA (sncRNA) 5' transfer RNA (tRNA) half
ggccggttagctcagt

SEQ ID NO: 22166 - DNA, 16 bp, Artificial Sequence
  synthetic circulating small noncoding RNA (sncRNA) 5' transfer RNA (tRNA) half
ttcaaatcccggacga

SEQ ID NO: 22167 - DNA, 14 bp, Artificial Sequence
  synthetic circulating small noncoding RNA (sncRNA) 5' transfer RNA (tRNA) half
aacccgggccgcct

SEQ ID NO: 22168 - DNA, 26 bp, Artificial Sequence
  synthetic circulating small noncoding RNA (sncRNA) 5' transfer RNA (tRNA) half
ttcgatccatcgacctctgggttatg

SEQ ID NO: 22169 - DNA, 32 bp, Artificial Sequence
  synthetic circulating small noncoding RNA (sncRNA) 5' transfer RNA (tRNA) half
agagcgccgaatcctaaccactagaccaccag

SEQ ID NO: 22170 - DNA, 26 bp, Artificial Sequence
  synthetic circulating small noncoding RNA (sncRNA) 5' transfer RNA (tRNA) half
cgtgacaggcggggatactcaccact

SEQ ID NO: 22171 - DNA, 22 bp, Artificial Sequence
  synthetic circulating small noncoding RNA (sncRNA) 5' transfer RNA (tRNA) half
tctaaccaactgagctaaccgg

SEQ ID NO: 22172 - DNA, 23 bp, Artificial Sequence
  synthetic circulating small noncoding RNA (sncRNA) 5' transfer RNA (tRNA) half
attccggctcgaaggacttcgtg

SEQ ID NO: 22173 - DNA, 17 bp, Artificial Sequence
  synthetic circulating small noncoding RNA (sncRNA) 5' transfer RNA (tRNA) half
gttcgattcccggtcag

SEQ ID NO: 22174 - DNA, 23 bp, Artificial Sequence
  synthetic circulating small noncoding RNA (sncRNA) 5' transfer RNA (tRNA) half
tgtggcagcggtgggattcgaac

SEQ ID NO: 22175 - DNA, 22 bp, Artificial Sequence
  synthetic circulating small noncoding RNA (sncRNA) 5' transfer RNA (tRNA) half
ggttcgaatcccagcggggcct

SEQ ID NO: 22176 - DNA, 19 bp, Artificial Sequence
  synthetic circulating small noncoding RNA (sncRNA) 5' transfer RNA (tRNA) half
cgaaccagcgacctaagga

SEQ ID NO: 22177 - DNA, 16 bp, Artificial Sequence
  synthetic circulating small noncoding RNA (sncRNA) 5' transfer RNA (tRNA) half
accagggacctttaga

SEQ ID NO: 22178 - DNA, 16 bp, Artificial Sequence
  synthetic circulating small noncoding RNA (sncRNA) 5' transfer RNA (tRNA) half
tcgtccgggatttgaa

SEQ ID NO: 22179 - DNA, 17 bp, Artificial Sequence
  synthetic circulating small noncoding RNA (sncRNA) 5' transfer RNA (tRNA) half
accactcggccacctcg

SEQ ID NO: 22180 - DNA, 22 bp, Artificial Sequence
  synthetic circulating small noncoding RNA (sncRNA) 5' transfer RNA (tRNA) half
tccgactccgccgggactcgaa

SEQ ID NO: 22181 - DNA, 6 bp, Artificial Sequence
  synthetic circulating small noncoding RNA (sncRNA) 5' transfer RNA (tRNA) half
caggca

SEQ ID NO: 22182 - DNA, 27 bp, Artificial Sequence
  synthetic circulating small noncoding RNA (sncRNA) 5' transfer RNA (tRNA) half
ttggtagttcaatggtagaattctcgc

SEQ ID NO: 22183 - DNA, 28 bp, Artificial Sequence
  synthetic circulating small noncoding RNA (sncRNA) 5' transfer RNA (tRNA) half
gattccggctcgaaggacttcgtgcact

SEQ ID NO: 22184 - DNA, 36 bp, Artificial Sequence
  synthetic circulating small noncoding RNA (sncRNA) 5' transfer RNA (tRNA) half
agggtttccgtagtgtagtggttatcacgctcgcct

SEQ ID NO: 22185 - DNA, 16 bp, Artificial Sequence
  synthetic circulating small noncoding RNA (sncRNA) 5' transfer RNA (tRNA) half
tagtggttagtactct

SEQ ID NO: 22186 - DNA, 32 bp, Artificial Sequence
  synthetic circulating small noncoding RNA (sncRNA) 5' transfer RNA (tRNA) half
aatgcagagtactaaccactatacgatctcgg

SEQ ID NO: 22187 - DNA, 21 bp, Artificial Sequence
  synthetic circulating small noncoding RNA (sncRNA) 5' transfer RNA (tRNA) half
gtcccatgctgtaccgactga

SEQ ID NO: 22188 - DNA, 23 bp, Artificial Sequence
  synthetic circulating small noncoding RNA (sncRNA) 5' transfer RNA (tRNA) half
gaggttcgaactcaggaccttca

SEQ ID NO: 22189 - DNA, 25 bp, Artificial Sequence
  synthetic circulating small noncoding RNA (sncRNA) 5' transfer RNA (tRNA) half
gagttcaaatctcggtggaacctac

SEQ ID NO: 22190 - DNA, 37 bp, Artificial Sequence
  synthetic circulating small noncoding RNA (sncRNA) 5' transfer RNA (tRNA) half
cacaatccctggcttaggaggccaatgccttatccat

SEQ ID NO: 22191 - DNA, 23 bp, Artificial Sequence
  synthetic circulating small noncoding RNA (sncRNA) 5' transfer RNA (tRNA) half
tccccggttcgaaaccgggcgga

SEQ ID NO: 22192 - DNA, 22 bp, Artificial Sequence
  synthetic circulating small noncoding RNA (sncRNA) 5' transfer RNA (tRNA) half
gttcagtgaggtcccaccgaga

SEQ ID NO: 22193 - DNA, 44 bp, Artificial Sequence
  synthetic circulating small noncoding RNA (sncRNA) 5' transfer RNA (tRNA) half
tcctaagccagggattgtgggttcgagtcccacctggggtaaaa

SEQ ID NO: 22194 - DNA, 44 bp, Artificial Sequence
  synthetic circulating small noncoding RNA (sncRNA) 5' transfer RNA (tRNA) half
tcccgcgtgacaggcggggatactcaccactatactaacgagga

SEQ ID NO: 22195 - DNA, 11 bp, Artificial Sequence
  synthetic circulating small noncoding RNA (sncRNA) 5' transfer RNA (tRNA) half
gtcccatgctc

SEQ ID NO: 22196 - DNA, 8 bp, Artificial Sequence
  synthetic circulating small noncoding RNA (sncRNA) 5' transfer RNA (tRNA) half
ccgggccg

SEQ ID NO: 22197 - DNA, 15 bp, Artificial Sequence
  synthetic circulating small noncoding RNA (sncRNA) 5' transfer RNA (tRNA) half
gctagaccatgtggg

SEQ ID NO: 22198 - DNA, 39 bp, Artificial Sequence
  synthetic circulating small noncoding RNA (sncRNA) 5' transfer RNA (tRNA) half
ctgggtgaaaaccaggaatcctaaccgctagaccatatg

SEQ ID NO: 22199 - DNA, 12 bp, Artificial Sequence
  synthetic circulating small noncoding RNA (sncRNA) 5' transfer RNA (tRNA) half
gtctcatgctct

SEQ ID NO: 22200 - DNA, 23 bp, Artificial Sequence
  synthetic circulating small noncoding RNA (sncRNA) 5' transfer RNA (tRNA) half
tcgcctgccacgcgggaggcccg

SEQ ID NO: 22201 - DNA, 15 bp, Artificial Sequence
  synthetic circulating small noncoding RNA (sncRNA) 5' transfer RNA (tRNA) half
gtcctgccgcggtcg

SEQ ID NO: 22202 - DNA, 7 bp, Artificial Sequence
  synthetic circulating small noncoding RNA (sncRNA) 5' transfer RNA (tRNA) half
tggccga

SEQ ID NO: 22203 - DNA, 12 bp, Artificial Sequence
  synthetic circulating small noncoding RNA (sncRNA) 5' transfer RNA (tRNA) half
ttcgagccggat

SEQ ID NO: 22204 - DNA, 21 bp, Artificial Sequence
  synthetic circulating small noncoding RNA (sncRNA) 5' transfer RNA (tRNA) half
attgcattggccgggaatcga

SEQ ID NO: 22205 - DNA, 25 bp, Artificial Sequence
  synthetic circulating small noncoding RNA (sncRNA) 5' transfer RNA (tRNA) half
gaaccccggtctcccgcgtgacagg

SEQ ID NO: 22206 - DNA, 28 bp, Artificial Sequence
  synthetic circulating small noncoding RNA (sncRNA) 5' transfer RNA (tRNA) half
aatccagcgccttagaccgctcggccac

SEQ ID NO: 22207 - DNA, 33 bp, Artificial Sequence
  synthetic circulating small noncoding RNA (sncRNA) 5' transfer RNA (tRNA) half
gcgacagagtggttcaattccacctttcgggcg

SEQ ID NO: 22208 - DNA, 25 bp, Artificial Sequence
  synthetic circulating small noncoding RNA (sncRNA) 5' transfer RNA (tRNA) half
tgatcgtatagtggttagtactctg

SEQ ID NO: 22209 - DNA, 21 bp, Artificial Sequence
  synthetic circulating small noncoding RNA (sncRNA) 5' transfer RNA (tRNA) half
tggttcagtggtagaattctc

SEQ ID NO: 22210 - DNA, 22 bp, Artificial Sequence
  synthetic circulating small noncoding RNA (sncRNA) 5' transfer RNA (tRNA) half
attcccattcttgcgacccggg

SEQ ID NO: 22211 - DNA, 40 bp, Artificial Sequence
  synthetic circulating small noncoding RNA (sncRNA) 5' transfer RNA (tRNA) half
tggttagcactctggactctgaatccagcgatccgagttc

SEQ ID NO: 22212 - DNA, 21 bp, Artificial Sequence
  synthetic circulating small noncoding RNA (sncRNA) 5' transfer RNA (tRNA) half
gtaaaccaggggtcgcgagtt

SEQ ID NO: 22213 - DNA, 22 bp, Artificial Sequence
  synthetic circulating small noncoding RNA (sncRNA) 5' transfer RNA (tRNA) half
tcagtggtagaattctcgcctg

SEQ ID NO: 22214 - DNA, 16 bp, Artificial Sequence
  synthetic circulating small noncoding RNA (sncRNA) 5' transfer RNA (tRNA) half
tcggcgctctcaccgc

SEQ ID NO: 22215 - DNA, 22 bp, Artificial Sequence
  synthetic circulating small noncoding RNA (sncRNA) 5' transfer RNA (tRNA) half
tcgaaccggggacctttcgcgt

SEQ ID NO: 22216 - DNA, 17 bp, Artificial Sequence
  synthetic circulating small noncoding RNA (sncRNA) 5' transfer RNA (tRNA) half
gctggattcagagtcca

SEQ ID NO: 22217 - DNA, 29 bp, Artificial Sequence
  synthetic circulating small noncoding RNA (sncRNA) 5' transfer RNA (tRNA) half
tgccggggatcgaacccggggcctcatac

SEQ ID NO: 22218 - DNA, 20 bp, Artificial Sequence
  synthetic circulating small noncoding RNA (sncRNA) 5' transfer RNA (tRNA) half
ccggggttcgattccccgac

SEQ ID NO: 22219 - DNA, 41 bp, Artificial Sequence
  synthetic circulating small noncoding RNA (sncRNA) 5' transfer RNA (tRNA) half
taagccagggattgtgggttcgagtcccacctggggtggta

SEQ ID NO: 22220 - DNA, 26 bp, Artificial Sequence
  synthetic circulating small noncoding RNA (sncRNA) 5' transfer RNA (tRNA) half
caggtgggactcgaacccacaatccc

SEQ ID NO: 22221 - DNA, 12 bp, Artificial Sequence
  synthetic circulating small noncoding RNA (sncRNA) 5' transfer RNA (tRNA) half
gctctaccaact

SEQ ID NO: 22222 - DNA, 29 bp, Artificial Sequence
  synthetic circulating small noncoding RNA (sncRNA) 5' transfer RNA (tRNA) half
tccagcgccttagaccgctcggccacact

SEQ ID NO: 22223 - DNA, 9 bp, Artificial Sequence
  synthetic circulating small noncoding RNA (sncRNA) 5' transfer RNA (tRNA) half
cgagccccc

SEQ ID NO: 22224 - DNA, 30 bp, Artificial Sequence
  synthetic circulating small noncoding RNA (sncRNA) 5' transfer RNA (tRNA) half
aggagatcctgggttcgaatcccagcgggg

SEQ ID NO: 22225 - DNA, 23 bp, Artificial Sequence
  synthetic circulating small noncoding RNA (sncRNA) 5' transfer RNA (tRNA) half
gattcaaagtccagagtgctaac

SEQ ID NO: 22226 - DNA, 15 bp, Artificial Sequence
  synthetic circulating small noncoding RNA (sncRNA) 5' transfer RNA (tRNA) half
gtgaggcgaacgtga

SEQ ID NO: 22227 - DNA, 22 bp, Artificial Sequence
  synthetic circulating small noncoding RNA (sncRNA) 5' transfer RNA (tRNA) half
tttggagatgccggggatcgaa

SEQ ID NO: 22228 - DNA, 22 bp, Artificial Sequence
  synthetic circulating small noncoding RNA (sncRNA) 5' transfer RNA (tRNA) half
ccgcggcccgggttcgattccc

SEQ ID NO: 22229 - DNA, 26 bp, Artificial Sequence
  synthetic circulating small noncoding RNA (sncRNA) 5' transfer RNA (tRNA) half
ccgtgactcggattcgaaccgaggtt

SEQ ID NO: 22230 - DNA, 27 bp, Artificial Sequence
  synthetic circulating small noncoding RNA (sncRNA) 5' transfer RNA (tRNA) half
gctagctcagtgggtagagcatgagac

SEQ ID NO: 22231 - DNA, 11 bp, Artificial Sequence
  synthetic circulating small noncoding RNA (sncRNA) 5' transfer RNA (tRNA) half
tcccataccgg

SEQ ID NO: 22232 - DNA, 25 bp, Artificial Sequence
  synthetic circulating small noncoding RNA (sncRNA) 5' transfer RNA (tRNA) half
tcagtcggtagagcatgagactctt

SEQ ID NO: 22233 - DNA, 31 bp, Artificial Sequence
  synthetic circulating small noncoding RNA (sncRNA) 5' transfer RNA (tRNA) half
aggccccagcgagatttgaactcgcgacccc

SEQ ID NO: 22234 - DNA, 40 bp, Artificial Sequence
  synthetic circulating small noncoding RNA (sncRNA) 5' transfer RNA (tRNA) half
cccggctagctcagtcggtagagcatgagactcttaatct

SEQ ID NO: 22235 - DNA, 11 bp, Artificial Sequence
  synthetic circulating small noncoding RNA (sncRNA) 5' transfer RNA (tRNA) half
gaaccgaggac

SEQ ID NO: 22236 - DNA, 12 bp, Artificial Sequence
  synthetic circulating small noncoding RNA (sncRNA) 5' transfer RNA (tRNA) half
ttcgggggcgtg

SEQ ID NO: 22237 - DNA, 39 bp, Artificial Sequence
  synthetic circulating small noncoding RNA (sncRNA) 5' transfer RNA (tRNA) half
aatctgagggtccagggttcaagtccctgttcgggcgct

SEQ ID NO: 22238 - DNA, 6 bp, Artificial Sequence
  synthetic circulating small noncoding RNA (sncRNA) 5' transfer RNA (tRNA) half
gccgtg

SEQ ID NO: 22239 - DNA, 34 bp, Artificial Sequence
  synthetic circulating small noncoding RNA (sncRNA) 5' transfer RNA (tRNA) half
agctggctcgttggtctaggggtatgattctcgg

SEQ ID NO: 22240 - DNA, 9 bp, Artificial Sequence
  synthetic circulating small noncoding RNA (sncRNA) 5' transfer RNA (tRNA) half
cgcgtgcag

SEQ ID NO: 22241 - DNA, 20 bp, Artificial Sequence
  synthetic circulating small noncoding RNA (sncRNA) 5' transfer RNA (tRNA) half
gcgctctcaccgccgcggcc

SEQ ID NO: 22242 - DNA, 19 bp, Artificial Sequence
  synthetic circulating small noncoding RNA (sncRNA) 5' transfer RNA (tRNA) half
tcccggcccatgcagagtc

SEQ ID NO: 22243 - DNA, 32 bp, Artificial Sequence
  synthetic circulating small noncoding RNA (sncRNA) 5' transfer RNA (tRNA) half
gggattgtgggttcgagtcccatctggggtgg

SEQ ID NO: 22244 - DNA, 32 bp, Artificial Sequence
  synthetic circulating small noncoding RNA (sncRNA) 5' transfer RNA (tRNA) half
ccaagcagttgacccgggttcgattcccggcc

SEQ ID NO: 22245 - DNA, 9 bp, Artificial Sequence
  synthetic circulating small noncoding RNA (sncRNA) 5' transfer RNA (tRNA) half
tcgattccc

SEQ ID NO: 22246 - DNA, 13 bp, Artificial Sequence
  synthetic circulating small noncoding RNA (sncRNA) 5' transfer RNA (tRNA) half
ttccgcccggttt

SEQ ID NO: 22247 - DNA, 28 bp, Artificial Sequence
  synthetic circulating small noncoding RNA (sncRNA) 5' transfer RNA (tRNA) half
taggttccaccgagatttgaactcggat

SEQ ID NO: 22248 - DNA, 12 bp, Artificial Sequence
  synthetic circulating small noncoding RNA (sncRNA) 5' transfer RNA (tRNA) half
tcccggtatggg

SEQ ID NO: 22249 - DNA, 28 bp, Artificial Sequence
  synthetic circulating small noncoding RNA (sncRNA) 5' transfer RNA (tRNA) half
tgaaccaccaacctttcggttaacagcc

SEQ ID NO: 22250 - DNA, 35 bp, Artificial Sequence
  synthetic circulating small noncoding RNA (sncRNA) 5' transfer RNA (tRNA) half
atcggctcgttggtctaggggtatgattctcgctt

SEQ ID NO: 22251 - DNA, 22 bp, Artificial Sequence
  synthetic circulating small noncoding RNA (sncRNA) 5' transfer RNA (tRNA) half
tgtgaggcgaacgtgataacca

SEQ ID NO: 22252 - DNA, 16 bp, Artificial Sequence
  synthetic circulating small noncoding RNA (sncRNA) 5' transfer RNA (tRNA) half
aacccacgcctccagg

SEQ ID NO: 22253 - DNA, 19 bp, Artificial Sequence
  synthetic circulating small noncoding RNA (sncRNA) 5' transfer RNA (tRNA) half
tggcagtggtgggattcga

SEQ ID NO: 22254 - DNA, 19 bp, Artificial Sequence
  synthetic circulating small noncoding RNA (sncRNA) 5' transfer RNA (tRNA) half
cgtatggaggcgtgggttc

SEQ ID NO: 22255 - DNA, 13 bp, Artificial Sequence
  synthetic circulating small noncoding RNA (sncRNA) 5' transfer RNA (tRNA) half
cccatgctctacc

SEQ ID NO: 22256 - DNA, 17 bp, Artificial Sequence
  synthetic circulating small noncoding RNA (sncRNA) 5' transfer RNA (tRNA) half
accggggacctttcgcg

SEQ ID NO: 22257 - DNA, 13 bp, Artificial Sequence
  synthetic circulating small noncoding RNA (sncRNA) 5' transfer RNA (tRNA) half
gattccccgacgg

SEQ ID NO: 22258 - DNA, 29 bp, Artificial Sequence
  synthetic circulating small noncoding RNA (sncRNA) 5' transfer RNA (tRNA) half
acctgcgcggggaaaccccaatggatttc

SEQ ID NO: 22259 - DNA, 24 bp, Artificial Sequence
  synthetic circulating small noncoding RNA (sncRNA) 5' transfer RNA (tRNA) half
agaattctaccactgaaccaccaa

SEQ ID NO: 22260 - DNA, 17 bp, Artificial Sequence
  synthetic circulating small noncoding RNA (sncRNA) 5' transfer RNA (tRNA) half
ggtagagcatcagactt

SEQ ID NO: 22261 - DNA, 15 bp, Artificial Sequence
  synthetic circulating small noncoding RNA (sncRNA) 5' transfer RNA (tRNA) half
atggataaggcactg

SEQ ID NO: 22262 - DNA, 11 bp, Artificial Sequence
  synthetic circulating small noncoding RNA (sncRNA) 5' transfer RNA (tRNA) half
attccggctcg

SEQ ID NO: 22263 - DNA, 16 bp, Artificial Sequence
  synthetic circulating small noncoding RNA (sncRNA) 5' transfer RNA (tRNA) half
ggatcgctggattcag

SEQ ID NO: 22264 - DNA, 18 bp, Artificial Sequence
  synthetic circulating small noncoding RNA (sncRNA) 5' transfer RNA (tRNA) half
gaaccaccaacctttcgg

SEQ ID NO: 22265 - DNA, 20 bp, Artificial Sequence
  synthetic circulating small noncoding RNA (sncRNA) 5' transfer RNA (tRNA) half
acccacaatcgtagtcggca

SEQ ID NO: 22266 - DNA, 21 bp, Artificial Sequence
  synthetic circulating small noncoding RNA (sncRNA) 5' transfer RNA (tRNA) half
attccggctcgaaggacttcg

SEQ ID NO: 22267 - DNA, 10 bp, Artificial Sequence
  synthetic circulating small noncoding RNA (sncRNA) 5' transfer RNA (tRNA) half
aggtccccgg

SEQ ID NO: 22268 - DNA, 40 bp, Artificial Sequence
  synthetic circulating small noncoding RNA (sncRNA) 5' transfer RNA (tRNA) half
aaggccctgctgggatttgaacccaggatctcctgtttac

SEQ ID NO: 22269 - DNA, 10 bp, Artificial Sequence
  synthetic circulating small noncoding RNA (sncRNA) 5' transfer RNA (tRNA) half
gggttcgaat

SEQ ID NO: 22270 - DNA, 23 bp, Artificial Sequence
  synthetic circulating small noncoding RNA (sncRNA) 5' transfer RNA (tRNA) half
ttgcgacccgggttcgattcccg

SEQ ID NO: 22271 - DNA, 38 bp, Artificial Sequence
  synthetic circulating small noncoding RNA (sncRNA) 5' transfer RNA (tRNA) half
atccatcgacctctgggttatgggcccagcacgcttcc

SEQ ID NO: 22272 - DNA, 33 bp, Artificial Sequence
  synthetic circulating small noncoding RNA (sncRNA) 5' transfer RNA (tRNA) half
caggaatcctaaccgctagaccatatgggagct

SEQ ID NO: 22273 - DNA, 13 bp, Artificial Sequence
  synthetic circulating small noncoding RNA (sncRNA) 5' transfer RNA (tRNA) half
ctcccggtatggg

SEQ ID NO: 22274 - DNA, 13 bp, Artificial Sequence
  synthetic circulating small noncoding RNA (sncRNA) 5' transfer RNA (tRNA) half
agtggctaggatt

SEQ ID NO: 22275 - DNA, 32 bp, Artificial Sequence
  synthetic circulating small noncoding RNA (sncRNA) 5' transfer RNA (tRNA) half
gcgggaggcccgggttcggttcccggccaatg

SEQ ID NO: 22276 - DNA, 45 bp, Artificial Sequence
  synthetic circulating small noncoding RNA (sncRNA) 5' transfer RNA (tRNA) half
tggtgtaatggttagcactctggactctgaatccagcgatccgag

SEQ ID NO: 22277 - DNA, 17 bp, Artificial Sequence
  synthetic circulating small noncoding RNA (sncRNA) 5' transfer RNA (tRNA) half
cgggagtcgaacccggg

SEQ ID NO: 22278 - DNA, 35 bp, Artificial Sequence
  synthetic circulating small noncoding RNA (sncRNA) 5' transfer RNA (tRNA) half
tcagaagattgagggttcgaatcccttcgtggttg

SEQ ID NO: 22279 - DNA, 33 bp, Artificial Sequence
  synthetic circulating small noncoding RNA (sncRNA) 5' transfer RNA (tRNA) half
tgaggtcccaccgagatttgaactcggatcgct

SEQ ID NO: 22280 - DNA, 16 bp, Artificial Sequence
  synthetic circulating small noncoding RNA (sncRNA) 5' transfer RNA (tRNA) half
cgaaccggggacctct

SEQ ID NO: 22281 - DNA, 18 bp, Artificial Sequence
  synthetic circulating small noncoding RNA (sncRNA) 5' transfer RNA (tRNA) half
ggtcgatggatcgaaacc

SEQ ID NO: 22282 - DNA, 29 bp, Artificial Sequence
  synthetic circulating small noncoding RNA (sncRNA) 5' transfer RNA (tRNA) half
ccgggccgcggcggtgagagcgccgaatc

SEQ ID NO: 22283 - DNA, 10 bp, Artificial Sequence
  synthetic circulating small noncoding RNA (sncRNA) 5' transfer RNA (tRNA) half
ctaatccccc

SEQ ID NO: 22284 - DNA, 14 bp, Artificial Sequence
  synthetic circulating small noncoding RNA (sncRNA) 5' transfer RNA (tRNA) half
cctgaccgggaatc

SEQ ID NO: 22285 - DNA, 31 bp, Artificial Sequence
  synthetic circulating small noncoding RNA (sncRNA) 5' transfer RNA (tRNA) half
gttccttcgagccggattcgaaccagcgacc

SEQ ID NO: 22286 - DNA, 16 bp, Artificial Sequence
  synthetic circulating small noncoding RNA (sncRNA) 5' transfer RNA (tRNA) half
cactccaccaactcag

SEQ ID NO: 22287 - DNA, 13 bp, Artificial Sequence
  synthetic circulating small noncoding RNA (sncRNA) 5' transfer RNA (tRNA) half
tcccatgctctac

SEQ ID NO: 22288 - DNA, 37 bp, Artificial Sequence
  synthetic circulating small noncoding RNA (sncRNA) 5' transfer RNA (tRNA) half
atctcagggtcgtgggttcgagccccacgttgggcgc

SEQ ID NO: 22289 - DNA, 16 bp, Artificial Sequence
  synthetic circulating small noncoding RNA (sncRNA) 5' transfer RNA (tRNA) half
aacctggcggaaacag

SEQ ID NO: 22290 - DNA, 25 bp, Artificial Sequence
  synthetic circulating small noncoding RNA (sncRNA) 5' transfer RNA (tRNA) half
gtagctcagtggtagagcgcatgct

SEQ ID NO: 22291 - DNA, 21 bp, Artificial Sequence
  synthetic circulating small noncoding RNA (sncRNA) 5' transfer RNA (tRNA) half
ccttcgatagctcagctggta

SEQ ID NO: 22292 - DNA, 15 bp, Artificial Sequence
  synthetic circulating small noncoding RNA (sncRNA) 5' transfer RNA (tRNA) half
cgggttcgattcccg

SEQ ID NO: 22293 - DNA, 20 bp, Artificial Sequence
  synthetic circulating small noncoding RNA (sncRNA) 5' transfer RNA (tRNA) half
gaacccacgccatcgaaatg

SEQ ID NO: 22294 - DNA, 26 bp, Artificial Sequence
  synthetic circulating small noncoding RNA (sncRNA) 5' transfer RNA (tRNA) half
gcgtgacaggcggggatactcaccac

SEQ ID NO: 22295 - DNA, 38 bp, Artificial Sequence
  synthetic circulating small noncoding RNA (sncRNA) 5' transfer RNA (tRNA) half
cttgaccccgacgtgacttgaacacgcaaccttctgat

SEQ ID NO: 22296 - DNA, 36 bp, Artificial Sequence
  synthetic circulating small noncoding RNA (sncRNA) 5' transfer RNA (tRNA) half
gagtcgaacccgggccgcctgggtgaaaaccaggaa

SEQ ID NO: 22297 - DNA, 23 bp, Artificial Sequence
  synthetic circulating small noncoding RNA (sncRNA) 5' transfer RNA (tRNA) half
gtggtagaattctcgcctgccac

SEQ ID NO: 22298 - DNA, 12 bp, Artificial Sequence
  synthetic circulating small noncoding RNA (sncRNA) 5' transfer RNA (tRNA) half
gccgcggcggtg

SEQ ID NO: 22299 - DNA, 20 bp, Artificial Sequence
  synthetic circulating small noncoding RNA (sncRNA) 5' transfer RNA (tRNA) half
agtagtcgtggccgagtggt

SEQ ID NO: 22300 - DNA, 16 bp, Artificial Sequence
  synthetic circulating small noncoding RNA (sncRNA) 5' transfer RNA (tRNA) half
agtcctgccgcggtcg

SEQ ID NO: 22301 - DNA, 11 bp, Artificial Sequence
  synthetic circulating small noncoding RNA (sncRNA) 5' transfer RNA (tRNA) half
ggcgagaattc

SEQ ID NO: 22302 - DNA, 14 bp, Artificial Sequence
  synthetic circulating small noncoding RNA (sncRNA) 5' transfer RNA (tRNA) half
gggactcgaacccg

SEQ ID NO: 22303 - DNA, 31 bp, Artificial Sequence
  synthetic circulating small noncoding RNA (sncRNA) 5' transfer RNA (tRNA) half
ctgcggccacaacgcagagtactaaccacta

SEQ ID NO: 22304 - DNA, 25 bp, Artificial Sequence
  synthetic circulating small noncoding RNA (sncRNA) 5' transfer RNA (tRNA) half
gtagtggttatcacgttcgcctcac

SEQ ID NO: 22305 - DNA, 16 bp, Artificial Sequence
  synthetic circulating small noncoding RNA (sncRNA) 5' transfer RNA (tRNA) half
tcccggacgagcccca

SEQ ID NO: 22306 - DNA, 17 bp, Artificial Sequence
  synthetic circulating small noncoding RNA (sncRNA) 5' transfer RNA (tRNA) half
actccggctcgaaggag

SEQ ID NO: 22307 - DNA, 13 bp, Artificial Sequence
  synthetic circulating small noncoding RNA (sncRNA) 5' transfer RNA (tRNA) half
acccgggccgcct

SEQ ID NO: 22308 - DNA, 27 bp, Artificial Sequence
  synthetic circulating small noncoding RNA (sncRNA) 5' transfer RNA (tRNA) half
gtcctgagttcgaacctcagagggggc

SEQ ID NO: 22309 - DNA, 22 bp, Artificial Sequence
  synthetic circulating small noncoding RNA (sncRNA) 5' transfer RNA (tRNA) half
cgtcgactctggcgggactcga

SEQ ID NO: 22310 - DNA, 36 bp, Artificial Sequence
  synthetic circulating small noncoding RNA (sncRNA) 5' transfer RNA (tRNA) half
tgtatgaggccccgggttcgatccccggcatctcca

SEQ ID NO: 22311 - DNA, 28 bp, Artificial Sequence
  synthetic circulating small noncoding RNA (sncRNA) 5' transfer RNA (tRNA) half
gatcctgggttcgaatcccagtggggcc

SEQ ID NO: 22312 - DNA, 10 bp, Artificial Sequence
  synthetic circulating small noncoding RNA (sncRNA) 5' transfer RNA (tRNA) half
gtcgaacctg

SEQ ID NO: 22313 - DNA, 30 bp, Artificial Sequence
  synthetic circulating small noncoding RNA (sncRNA) 5' transfer RNA (tRNA) half
tcgctggattcagagtccagagtgctaacc

SEQ ID NO: 22314 - DNA, 18 bp, Artificial Sequence
  synthetic circulating small noncoding RNA (sncRNA) 5' transfer RNA (tRNA) half
ttgcgttggccgggaatc

SEQ ID NO: 22315 - DNA, 45 bp, Artificial Sequence
  synthetic circulating small noncoding RNA (sncRNA) 5' transfer RNA (tRNA) half
actcggatcgctggattcagagtccagagtgctaaccattacacc

SEQ ID NO: 22316 - DNA, 6 bp, Artificial Sequence
  synthetic circulating small noncoding RNA (sncRNA) 5' transfer RNA (tRNA) half
gacgcg

SEQ ID NO: 22317 - DNA, 27 bp, Artificial Sequence
  synthetic circulating small noncoding RNA (sncRNA) 5' transfer RNA (tRNA) half
agtggtagaattctcgcctgccacgcg

SEQ ID NO: 22318 - DNA, 16 bp, Artificial Sequence
  synthetic circulating small noncoding RNA (sncRNA) 5' transfer RNA (tRNA) half
taacgaggactatgtt

SEQ ID NO: 22319 - DNA, 15 bp, Artificial Sequence
  synthetic circulating small noncoding RNA (sncRNA) 5' transfer RNA (tRNA) half
gtagcgtggccgagc

SEQ ID NO: 22320 - DNA, 10 bp, Artificial Sequence
  synthetic circulating small noncoding RNA (sncRNA) 5' transfer RNA (tRNA) half
ccggttagct

SEQ ID NO: 22321 - DNA, 30 bp, Artificial Sequence
  synthetic circulating small noncoding RNA (sncRNA) 5' transfer RNA (tRNA) half
tggcccgtacggggatcgaacccgcgacct

SEQ ID NO: 22322 - DNA, 34 bp, Artificial Sequence
  synthetic circulating small noncoding RNA (sncRNA) 5' transfer RNA (tRNA) half
cataccgggagtcgaacccgggccgcctgggtga

SEQ ID NO: 22323 - DNA, 20 bp, Artificial Sequence
  synthetic circulating small noncoding RNA (sncRNA) 5' transfer RNA (tRNA) half
gccggattcgaaccagcgac

SEQ ID NO: 22324 - DNA, 27 bp, Artificial Sequence
  synthetic circulating small noncoding RNA (sncRNA) 5' transfer RNA (tRNA) half
gcagagtactaaccactatacgatctc

SEQ ID NO: 22325 - DNA, 9 bp, Artificial Sequence
  synthetic circulating small noncoding RNA (sncRNA) 5' transfer RNA (tRNA) half
cggcccggg

SEQ ID NO: 22326 - DNA, 14 bp, Artificial Sequence
  synthetic circulating small noncoding RNA (sncRNA) 5' transfer RNA (tRNA) half
tgaactcggatcgc

SEQ ID NO: 22327 - DNA, 27 bp, Artificial Sequence
  synthetic circulating small noncoding RNA (sncRNA) 5' transfer RNA (tRNA) half
tctgatgctctaccgactgagctatcc

SEQ ID NO: 22328 - DNA, 36 bp, Artificial Sequence
  synthetic circulating small noncoding RNA (sncRNA) 5' transfer RNA (tRNA) half
tactggcccgtacggggatcgaacccgcgaccttgg

SEQ ID NO: 22329 - DNA, 17 bp, Artificial Sequence
  synthetic circulating small noncoding RNA (sncRNA) 5' transfer RNA (tRNA) half
tcgattcccgggcggcg

SEQ ID NO: 22330 - DNA, 8 bp, Artificial Sequence
  synthetic circulating small noncoding RNA (sncRNA) 5' transfer RNA (tRNA) half
ctcggatc

SEQ ID NO: 22331 - DNA, 29 bp, Artificial Sequence
  synthetic circulating small noncoding RNA (sncRNA) 5' transfer RNA (tRNA) half
aggccccagcgagatttgaactcgcgacc

SEQ ID NO: 22332 - DNA, 24 bp, Artificial Sequence
  synthetic circulating small noncoding RNA (sncRNA) 5' transfer RNA (tRNA) half
tctcgcctgccacgcgggaggccc

SEQ ID NO: 22333 - DNA, 21 bp, Artificial Sequence
  synthetic circulating small noncoding RNA (sncRNA) 5' transfer RNA (tRNA) half
gggattagctcaaatggtaga

SEQ ID NO: 22334 - DNA, 23 bp, Artificial Sequence
  synthetic circulating small noncoding RNA (sncRNA) 5' transfer RNA (tRNA) half
agggttcgaacctgcgcggggag

SEQ ID NO: 22335 - DNA, 17 bp, Artificial Sequence
  synthetic circulating small noncoding RNA (sncRNA) 5' transfer RNA (tRNA) half
caactgagctaaccggc

SEQ ID NO: 22336 - DNA, 17 bp, Artificial Sequence
  synthetic circulating small noncoding RNA (sncRNA) 5' transfer RNA (tRNA) half
cagcacgcttccgctgc

SEQ ID NO: 22337 - DNA, 27 bp, Artificial Sequence
  synthetic circulating small noncoding RNA (sncRNA) 5' transfer RNA (tRNA) half
cgccgcggcccgggttcgattcccggt

SEQ ID NO: 22338 - DNA, 17 bp, Artificial Sequence
  synthetic circulating small noncoding RNA (sncRNA) 5' transfer RNA (tRNA) half
aggttggtggttcgagc

SEQ ID NO: 22339 - DNA, 16 bp, Artificial Sequence
  synthetic circulating small noncoding RNA (sncRNA) 5' transfer RNA (tRNA) half
ccgtatggaggcgtgg

SEQ ID NO: 22340 - DNA, 21 bp, Artificial Sequence
  synthetic circulating small noncoding RNA (sncRNA) 5' transfer RNA (tRNA) half
agtctcttcgggggcgtgggt

SEQ ID NO: 22341 - DNA, 16 bp, Artificial Sequence
  synthetic circulating small noncoding RNA (sncRNA) 5' transfer RNA (tRNA) half
cctgcgcggggagacc

SEQ ID NO: 22342 - DNA, 45 bp, Artificial Sequence
  synthetic circulating small noncoding RNA (sncRNA) 5' transfer RNA (tRNA) half
cctgtcacgcgggagaccggggttcgattccccgacggggagtct

SEQ ID NO: 22343 - DNA, 39 bp, Artificial Sequence
  synthetic circulating small noncoding RNA (sncRNA) 5' transfer RNA (tRNA) half
ttgaccccgacgtgacttgaacacgcaaccttctgatct

SEQ ID NO: 22344 - DNA, 8 bp, Artificial Sequence
  synthetic circulating small noncoding RNA (sncRNA) 5' transfer RNA (tRNA) half
gcccggat

SEQ ID NO: 22345 - DNA, 30 bp, Artificial Sequence
  synthetic circulating small noncoding RNA (sncRNA) 5' transfer RNA (tRNA) half
gagaattctaccactgaaccaccaatgcag

SEQ ID NO: 22346 - DNA, 15 bp, Artificial Sequence
  synthetic circulating small noncoding RNA (sncRNA) 5' transfer RNA (tRNA) half
tcgtagtcggcagga

SEQ ID NO: 22347 - DNA, 15 bp, Artificial Sequence
  synthetic circulating small noncoding RNA (sncRNA) 5' transfer RNA (tRNA) half
gaccgctcggccatc

SEQ ID NO: 22348 - DNA, 20 bp, Artificial Sequence
  synthetic circulating small noncoding RNA (sncRNA) 5' transfer RNA (tRNA) half
agactgacgcgctacctact

SEQ ID NO: 22349 - DNA, 22 bp, Artificial Sequence
  synthetic circulating small noncoding RNA (sncRNA) 5' transfer RNA (tRNA) half
cgggaatcgaacccgggccgcg

SEQ ID NO: 22350 - DNA, 17 bp, Artificial Sequence
  synthetic circulating small noncoding RNA (sncRNA) 5' transfer RNA (tRNA) half
ggattaagagtcccatg

SEQ ID NO: 22351 - DNA, 26 bp, Artificial Sequence
  synthetic circulating small noncoding RNA (sncRNA) 5' transfer RNA (tRNA) half
tcccataccgggagtcgaacccgggc

SEQ ID NO: 22352 - DNA, 22 bp, Artificial Sequence
  synthetic circulating small noncoding RNA (sncRNA) 5' transfer RNA (tRNA) half
ccccctctgaggttcgaactca

SEQ ID NO: 22353 - DNA, 14 bp, Artificial Sequence
  synthetic circulating small noncoding RNA (sncRNA) 5' transfer RNA (tRNA) half
cccggtcagggaaa

SEQ ID NO: 22354 - DNA, 13 bp, Artificial Sequence
  synthetic circulating small noncoding RNA (sncRNA) 5' transfer RNA (tRNA) half
cgaccttggcgtt

SEQ ID NO: 22355 - DNA, 10 bp, Artificial Sequence
  synthetic circulating small noncoding RNA (sncRNA) 5' transfer RNA (tRNA) half
ggggttcgat

SEQ ID NO: 22356 - DNA, 15 bp, Artificial Sequence
  synthetic circulating small noncoding RNA (sncRNA) 5' transfer RNA (tRNA) half
agctggccggttagc

SEQ ID NO: 22357 - DNA, 17 bp, Artificial Sequence
  synthetic circulating small noncoding RNA (sncRNA) 5' transfer RNA (tRNA) half
gcaccgctgggattcga

SEQ ID NO: 22358 - DNA, 34 bp, Artificial Sequence
  synthetic circulating small noncoding RNA (sncRNA) 5' transfer RNA (tRNA) half
ttccgcccggtttcgaaccggggacctttcgcgt

SEQ ID NO: 22359 - DNA, 8 bp, Artificial Sequence
  synthetic circulating small noncoding RNA (sncRNA) 5' transfer RNA (tRNA) half
agggttcg

SEQ ID NO: 22360 - DNA, 29 bp, Artificial Sequence
  synthetic circulating small noncoding RNA (sncRNA) 5' transfer RNA (tRNA) half
atcacgggttcgaaccccgtccgtgcctg

SEQ ID NO: 22361 - DNA, 19 bp, Artificial Sequence
  synthetic circulating small noncoding RNA (sncRNA) 5' transfer RNA (tRNA) half
tgtatgaggccccgggttc

SEQ ID NO: 22362 - DNA, 34 bp, Artificial Sequence
  synthetic circulating small noncoding RNA (sncRNA) 5' transfer RNA (tRNA) half
cccgaacagggacttgaaccctggaccctcagat

SEQ ID NO: 22363 - DNA, 30 bp, Artificial Sequence
  synthetic circulating small noncoding RNA (sncRNA) 5' transfer RNA (tRNA) half
agccaggagtcgaacctggaatcttctgat

SEQ ID NO: 22364 - DNA, 43 bp, Artificial Sequence
  synthetic circulating small noncoding RNA (sncRNA) 5' transfer RNA (tRNA) half
agtgacagtcgcccggctagctcagtcggtagagcatgagact

SEQ ID NO: 22365 - DNA, 13 bp, Artificial Sequence
  synthetic circulating small noncoding RNA (sncRNA) 5' transfer RNA (tRNA) half
ctaaccaactgag

SEQ ID NO: 22366 - DNA, 26 bp, Artificial Sequence
  synthetic circulating small noncoding RNA (sncRNA) 5' transfer RNA (tRNA) half
gcaggattcgaacctgcgcggggaga

SEQ ID NO: 22367 - DNA, 28 bp, Artificial Sequence
  synthetic circulating small noncoding RNA (sncRNA) 5' transfer RNA (tRNA) half
aacgcagagtactaaccactatacgatc

SEQ ID NO: 22368 - DNA, 18 bp, Artificial Sequence
  synthetic circulating small noncoding RNA (sncRNA) 5' transfer RNA (tRNA) half
agaattctaccactgaac

SEQ ID NO: 22369 - DNA, 38 bp, Artificial Sequence
  synthetic circulating small noncoding RNA (sncRNA) 5' transfer RNA (tRNA) half
ctggagccttaatccagcgccttagaccgctcggccac

SEQ ID NO: 22370 - DNA, 12 bp, Artificial Sequence
  synthetic circulating small noncoding RNA (sncRNA) 5' transfer RNA (tRNA) half
acaggattcgaa

SEQ ID NO: 22371 - DNA, 36 bp, Artificial Sequence
  synthetic circulating small noncoding RNA (sncRNA) 5' transfer RNA (tRNA) half
tctaaaggtccctggttcgatcccgggtttcggcag

SEQ ID NO: 22372 - DNA, 19 bp, Artificial Sequence
  synthetic circulating small noncoding RNA (sncRNA) 5' transfer RNA (tRNA) half
ctagtggctaggattcggc

SEQ ID NO: 22373 - DNA, 26 bp, Artificial Sequence
  synthetic circulating small noncoding RNA (sncRNA) 5' transfer RNA (tRNA) half
gggattgtgggttcgagtcccatctg

SEQ ID NO: 22374 - DNA, 22 bp, Artificial Sequence
  synthetic circulating small noncoding RNA (sncRNA) 5' transfer RNA (tRNA) half
gtcggggaatcgaaccccggtc

SEQ ID NO: 22375 - DNA, 20 bp, Artificial Sequence
  synthetic circulating small noncoding RNA (sncRNA) 5' transfer RNA (tRNA) half
aaatcccggacgagccctgc

SEQ ID NO: 22376 - DNA, 21 bp, Artificial Sequence
  synthetic circulating small noncoding RNA (sncRNA) 5' transfer RNA (tRNA) half
tgcgagaggtagtgggatcga

SEQ ID NO: 22377 - DNA, 40 bp, Artificial Sequence
  synthetic circulating small noncoding RNA (sncRNA) 5' transfer RNA (tRNA) half
gtttccgtagtgtagtggttatcacgttcgcctaacacgc

SEQ ID NO: 22378 - DNA, 33 bp, Artificial Sequence
  synthetic circulating small noncoding RNA (sncRNA) 5' transfer RNA (tRNA) half
aagattgagggttcgagtcccttcgtggtcgaa

SEQ ID NO: 22379 - DNA, 17 bp, Artificial Sequence
  synthetic circulating small noncoding RNA (sncRNA) 5' transfer RNA (tRNA) half
ctccttcgagccggatt

SEQ ID NO: 22380 - DNA, 18 bp, Artificial Sequence
  synthetic circulating small noncoding RNA (sncRNA) 5' transfer RNA (tRNA) half
ctggttcgattccggctc

SEQ ID NO: 22381 - DNA, 23 bp, Artificial Sequence
  synthetic circulating small noncoding RNA (sncRNA) 5' transfer RNA (tRNA) half
cgcgtggcaggcgagaattctac

SEQ ID NO: 22382 - DNA, 17 bp, Artificial Sequence
  synthetic circulating small noncoding RNA (sncRNA) 5' transfer RNA (tRNA) half
gaccgctcggccacgct

SEQ ID NO: 22383 - DNA, 29 bp, Artificial Sequence
  synthetic circulating small noncoding RNA (sncRNA) 5' transfer RNA (tRNA) half
tgatgctctaccgactgagctatccaggc

SEQ ID NO: 22384 - DNA, 15 bp, Artificial Sequence
  synthetic circulating small noncoding RNA (sncRNA) 5' transfer RNA (tRNA) half
gagtatccccgcctg

SEQ ID NO: 22385 - DNA, 37 bp, Artificial Sequence
  synthetic circulating small noncoding RNA (sncRNA) 5' transfer RNA (tRNA) half
caatgccgtgactcggattcgaaccgaggttgctgcg

SEQ ID NO: 22386 - DNA, 22 bp, Artificial Sequence
  synthetic circulating small noncoding RNA (sncRNA) 5' transfer RNA (tRNA) half
aactgccgaaacccgggatcga

SEQ ID NO: 22387 - DNA, 11 bp, Artificial Sequence
  synthetic circulating small noncoding RNA (sncRNA) 5' transfer RNA (tRNA) half
tggagcacgat

SEQ ID NO: 22388 - DNA, 18 bp, Artificial Sequence
  synthetic circulating small noncoding RNA (sncRNA) 5' transfer RNA (tRNA) half
cggtgagagcgccgaatc

SEQ ID NO: 22389 - DNA, 24 bp, Artificial Sequence
  synthetic circulating small noncoding RNA (sncRNA) 5' transfer RNA (tRNA) half
ggttcaaatcccggacgagcccca

SEQ ID NO: 22390 - DNA, 42 bp, Artificial Sequence
  synthetic circulating small noncoding RNA (sncRNA) 5' transfer RNA (tRNA) half
ctcgcacccgaagcgagaatcatacccctagaccaacgagcc

SEQ ID NO: 22391 - DNA, 26 bp, Artificial Sequence
  synthetic circulating small noncoding RNA (sncRNA) 5' transfer RNA (tRNA) half
gtaaggcgtcggtctcgtaaaccgaa

SEQ ID NO: 22392 - DNA, 19 bp, Artificial Sequence
  synthetic circulating small noncoding RNA (sncRNA) 5' transfer RNA (tRNA) half
tgaactcggatcgctggat

SEQ ID NO: 22393 - DNA, 18 bp, Artificial Sequence
  synthetic circulating small noncoding RNA (sncRNA) 5' transfer RNA (tRNA) half
tcgatcccgggtttcggc

SEQ ID NO: 22394 - DNA, 17 bp, Artificial Sequence
  synthetic circulating small noncoding RNA (sncRNA) 5' transfer RNA (tRNA) half
ccggacgagcccaagca

SEQ ID NO: 22395 - DNA, 22 bp, Artificial Sequence
  synthetic circulating small noncoding RNA (sncRNA) 5' transfer RNA (tRNA) half
gtgacaggcggggatactcacc

SEQ ID NO: 22396 - DNA, 21 bp, Artificial Sequence
  synthetic circulating small noncoding RNA (sncRNA) 5' transfer RNA (tRNA) half
caagtgcattggccgggaatc

SEQ ID NO: 22397 - DNA, 16 bp, Artificial Sequence
  synthetic circulating small noncoding RNA (sncRNA) 5' transfer RNA (tRNA) half
cgccaaggtcgcgggt

SEQ ID NO: 22398 - DNA, 27 bp, Artificial Sequence
  synthetic circulating small noncoding RNA (sncRNA) 5' transfer RNA (tRNA) half
gatcctgggttcgaatcccagcggggc

SEQ ID NO: 22399 - DNA, 22 bp, Artificial Sequence
  synthetic circulating small noncoding RNA (sncRNA) 5' transfer RNA (tRNA) half
tcagttggtagagcggaggact

SEQ ID NO: 22400 - DNA, 29 bp, Artificial Sequence
  synthetic circulating small noncoding RNA (sncRNA) 5' transfer RNA (tRNA) half
gcgggagaccggggttcgattccccgacg

SEQ ID NO: 22401 - DNA, 33 bp, Artificial Sequence
  synthetic circulating small noncoding RNA (sncRNA) 5' transfer RNA (tRNA) half
tagcgcccgaacagggacttgaaccctggaccc

SEQ ID NO: 22402 - DNA, 19 bp, Artificial Sequence
  synthetic circulating small noncoding RNA (sncRNA) 5' transfer RNA (tRNA) half
gtcccaccgagatttgaac

SEQ ID NO: 22403 - DNA, 14 bp, Artificial Sequence
  synthetic circulating small noncoding RNA (sncRNA) 5' transfer RNA (tRNA) half
gcggcggtgaaagc

SEQ ID NO: 22404 - DNA, 24 bp, Artificial Sequence
  synthetic circulating small noncoding RNA (sncRNA) 5' transfer RNA (tRNA) half
cgagccagccaggagtcgaacctg

SEQ ID NO: 22405 - DNA, 28 bp, Artificial Sequence
  synthetic circulating small noncoding RNA (sncRNA) 5' transfer RNA (tRNA) half
tcgctggttcgattccggctcgaaggac

SEQ ID NO: 22406 - DNA, 13 bp, Artificial Sequence
  synthetic circulating small noncoding RNA (sncRNA) 5' transfer RNA (tRNA) half
tagtgtggccgag

SEQ ID NO: 22407 - DNA, 25 bp, Artificial Sequence
  synthetic circulating small noncoding RNA (sncRNA) 5' transfer RNA (tRNA) half
cgaacccgggtcaactgcttggaag

SEQ ID NO: 22408 - DNA, 8 bp, Artificial Sequence
  synthetic circulating small noncoding RNA (sncRNA) 5' transfer RNA (tRNA) half
accgggga

SEQ ID NO: 22409 - DNA, 17 bp, Artificial Sequence
  synthetic circulating small noncoding RNA (sncRNA) 5' transfer RNA (tRNA) half
cgcgggttcgaaccccg

SEQ ID NO: 22410 - DNA, 20 bp, Artificial Sequence
  synthetic circulating small noncoding RNA (sncRNA) 5' transfer RNA (tRNA) half
ggcccgggttcgactcccgg

SEQ ID NO: 22411 - DNA, 27 bp, Artificial Sequence
  synthetic circulating small noncoding RNA (sncRNA) 5' transfer RNA (tRNA) half
gaacgtgataaccactacactacggaa

SEQ ID NO: 22412 - DNA, 21 bp, Artificial Sequence
  synthetic circulating small noncoding RNA (sncRNA) 5' transfer RNA (tRNA) half
cacacgcgaaaggtccccggt

SEQ ID NO: 22413 - DNA, 25 bp, Artificial Sequence
  synthetic circulating small noncoding RNA (sncRNA) 5' transfer RNA (tRNA) half
ccattgcgccacagagcccacctgt

SEQ ID NO: 22414 - DNA, 6 bp, Artificial Sequence
  synthetic circulating small noncoding RNA (sncRNA) 5' transfer RNA (tRNA) half
tccggc

SEQ ID NO: 22415 - DNA, 22 bp, Artificial Sequence
  synthetic circulating small noncoding RNA (sncRNA) 5' transfer RNA (tRNA) half
accgggcggaaacaagcagtct

SEQ ID NO: 22416 - DNA, 23 bp, Artificial Sequence
  synthetic circulating small noncoding RNA (sncRNA) 5' transfer RNA (tRNA) half
tcaggatggccgagcggtctaag

SEQ ID NO: 22417 - DNA, 18 bp, Artificial Sequence
  synthetic circulating small noncoding RNA (sncRNA) 5' transfer RNA (tRNA) half
cggccacaacgcagagta

SEQ ID NO: 22418 - DNA, 18 bp, Artificial Sequence
  synthetic circulating small noncoding RNA (sncRNA) 5' transfer RNA (tRNA) half
gggcacccggatttgaac

SEQ ID NO: 22419 - DNA, 26 bp, Artificial Sequence
  synthetic circulating small noncoding RNA (sncRNA) 5' transfer RNA (tRNA) half
ctttgcatgtatgaggccccgggttc

SEQ ID NO: 22420 - DNA, 25 bp, Artificial Sequence
  synthetic circulating small noncoding RNA (sncRNA) 5' transfer RNA (tRNA) half
aaacttgggctcgtccgggatttga

SEQ ID NO: 22421 - DNA, 35 bp, Artificial Sequence
  synthetic circulating small noncoding RNA (sncRNA) 5' transfer RNA (tRNA) half
gaacagggacttgaaccctggaccctcagattaaa

SEQ ID NO: 22422 - DNA, 42 bp, Artificial Sequence
  synthetic circulating small noncoding RNA (sncRNA) 5' transfer RNA (tRNA) half
gcagcggtgggattcgaacccacgcccccgaagagactggag

SEQ ID NO: 22423 - DNA, 16 bp, Artificial Sequence
  synthetic circulating small noncoding RNA (sncRNA) 5' transfer RNA (tRNA) half
aaatcacgtcggggtc

SEQ ID NO: 22424 - DNA, 24 bp, Artificial Sequence
  synthetic circulating small noncoding RNA (sncRNA) 5' transfer RNA (tRNA) half
caggattcgaacctgcgcggggag

SEQ ID NO: 22425 - DNA, 37 bp, Artificial Sequence
  synthetic circulating small noncoding RNA (sncRNA) 5' transfer RNA (tRNA) half
cgggaatcgaacccgggcctcccgcgtggcaggcgag

SEQ ID NO: 22426 - DNA, 19 bp, Artificial Sequence
  synthetic circulating small noncoding RNA (sncRNA) 5' transfer RNA (tRNA) half
ccggggacctttcgcgtgt

SEQ ID NO: 22427 - DNA, 30 bp, Artificial Sequence
  synthetic circulating small noncoding RNA (sncRNA) 5' transfer RNA (tRNA) half
ggattaagagtcccatgctctaccgactga

SEQ ID NO: 22428 - DNA, 20 bp, Artificial Sequence
  synthetic circulating small noncoding RNA (sncRNA) 5' transfer RNA (tRNA) half
gttcaatccccggcatctcc

SEQ ID NO: 22429 - DNA, 27 bp, Artificial Sequence
  synthetic circulating small noncoding RNA (sncRNA) 5' transfer RNA (tRNA) half
cgtgacaggcggggatactaaccacta

SEQ ID NO: 22430 - DNA, 12 bp, Artificial Sequence
  synthetic circulating small noncoding RNA (sncRNA) 5' transfer RNA (tRNA) half
ggatggccgagc

SEQ ID NO: 22431 - DNA, 20 bp, Artificial Sequence
  synthetic circulating small noncoding RNA (sncRNA) 5' transfer RNA (tRNA) half
acgcgagaggtccccggttc

SEQ ID NO: 22432 - DNA, 21 bp, Artificial Sequence
  synthetic circulating small noncoding RNA (sncRNA) 5' transfer RNA (tRNA) half
attcgaacccatgcgtgcaga

SEQ ID NO: 22433 - DNA, 7 bp, Artificial Sequence
  synthetic circulating small noncoding RNA (sncRNA) 5' transfer RNA (tRNA) half
ggctcat

SEQ ID NO: 22434 - DNA, 17 bp, Artificial Sequence
  synthetic circulating small noncoding RNA (sncRNA) 5' transfer RNA (tRNA) half
gttcgattcccggcatc

SEQ ID NO: 22435 - DNA, 15 bp, Artificial Sequence
  synthetic circulating small noncoding RNA (sncRNA) 5' transfer RNA (tRNA) half
ccgcggcggtgagag

SEQ ID NO: 22436 - DNA, 25 bp, Artificial Sequence
  synthetic circulating small noncoding RNA (sncRNA) 5' transfer RNA (tRNA) half
ccaaagcgagaatcatacccctaga

SEQ ID NO: 22437 - DNA, 7 bp, Artificial Sequence
  synthetic circulating small noncoding RNA (sncRNA) 5' transfer RNA (tRNA) half
ccgggtt

SEQ ID NO: 22438 - DNA, 27 bp, Artificial Sequence
  synthetic circulating small noncoding RNA (sncRNA) 5' transfer RNA (tRNA) half
gttcccataccgggagtcgaacccggg

SEQ ID NO: 22439 - DNA, 21 bp, Artificial Sequence
  synthetic circulating small noncoding RNA (sncRNA) 5' transfer RNA (tRNA) half
ggttcagtggtagaattctcg

SEQ ID NO: 22440 - DNA, 13 bp, Artificial Sequence
  synthetic circulating small noncoding RNA (sncRNA) 5' transfer RNA (tRNA) half
acccacgcccccg

SEQ ID NO: 22441 - DNA, 6 bp, Artificial Sequence
  synthetic circulating small noncoding RNA (sncRNA) 5' transfer RNA (tRNA) half
gcgact

SEQ ID NO: 22442 - DNA, 23 bp, Artificial Sequence
  synthetic circulating small noncoding RNA (sncRNA) 5' transfer RNA (tRNA) half
ggacttgaaccctggaccctcag

SEQ ID NO: 22443 - DNA, 20 bp, Artificial Sequence
  synthetic circulating small noncoding RNA (sncRNA) 5' transfer RNA (tRNA) half
ggttcgactcctggctggct

SEQ ID NO: 22444 - DNA, 38 bp, Artificial Sequence
  synthetic circulating small noncoding RNA (sncRNA) 5' transfer RNA (tRNA) half
gaaggccccagcgagatttgaactcgcgacccctggtt

SEQ ID NO: 22445 - DNA, 16 bp, Artificial Sequence
  synthetic circulating small noncoding RNA (sncRNA) 5' transfer RNA (tRNA) half
gcgagcgtgatgacca

SEQ ID NO: 22446 - DNA, 28 bp, Artificial Sequence
  synthetic circulating small noncoding RNA (sncRNA) 5' transfer RNA (tRNA) half
aaatgctctacccctgagctataccacc

SEQ ID NO: 22447 - DNA, 29 bp, Artificial Sequence
  synthetic circulating small noncoding RNA (sncRNA) 5' transfer RNA (tRNA) half
aggcgagaattctaccattgaactaccaa

SEQ ID NO: 22448 - DNA, 38 bp, Artificial Sequence
  synthetic circulating small noncoding RNA (sncRNA) 5' transfer RNA (tRNA) half
cgcccaacgtggggctcgaacccacgaccctgagatta

SEQ ID NO: 22449 - DNA, 18 bp, Artificial Sequence
  synthetic circulating small noncoding RNA (sncRNA) 5' transfer RNA (tRNA) half
ctctggactttgaatcca

SEQ ID NO: 22450 - DNA, 30 bp, Artificial Sequence
  synthetic circulating small noncoding RNA (sncRNA) 5' transfer RNA (tRNA) half
tctggccggttagctcagttggttagagcg

SEQ ID NO: 22451 - DNA, 9 bp, Artificial Sequence
  synthetic circulating small noncoding RNA (sncRNA) 5' transfer RNA (tRNA) half
agaccaacg

SEQ ID NO: 22452 - DNA, 20 bp, Artificial Sequence
  synthetic circulating small noncoding RNA (sncRNA) 5' transfer RNA (tRNA) half
aaacatctgccctctctgag

SEQ ID NO: 22453 - DNA, 35 bp, Artificial Sequence
  synthetic circulating small noncoding RNA (sncRNA) 5' transfer RNA (tRNA) half
ccgaagcgagaatcatacccctagaccaacgagcc

SEQ ID NO: 22454 - DNA, 11 bp, Artificial Sequence
  synthetic circulating small noncoding RNA (sncRNA) 5' transfer RNA (tRNA) half
tggagacgacg

SEQ ID NO: 22455 - DNA, 19 bp, Artificial Sequence
  synthetic circulating small noncoding RNA (sncRNA) 5' transfer RNA (tRNA) half
ccacgaagggattcgaacc

SEQ ID NO: 22456 - DNA, 29 bp, Artificial Sequence
  synthetic circulating small noncoding RNA (sncRNA) 5' transfer RNA (tRNA) half
tccagagtgctaaccattacaccatggaa

SEQ ID NO: 22457 - DNA, 15 bp, Artificial Sequence
  synthetic circulating small noncoding RNA (sncRNA) 5' transfer RNA (tRNA) half
gcctccttagcgcag

SEQ ID NO: 22458 - DNA, 28 bp, Artificial Sequence
  synthetic circulating small noncoding RNA (sncRNA) 5' transfer RNA (tRNA) half
tggattcaaagtccagagtgctaaccat

SEQ ID NO: 22459 - DNA, 20 bp, Artificial Sequence
  synthetic circulating small noncoding RNA (sncRNA) 5' transfer RNA (tRNA) half
gtctctgtggcgcaatcggt

SEQ ID NO: 22460 - DNA, 21 bp, Artificial Sequence
  synthetic circulating small noncoding RNA (sncRNA) 5' transfer RNA (tRNA) half
agtctccccgtcggggaatcg

SEQ ID NO: 22461 - DNA, 26 bp, Artificial Sequence
  synthetic circulating small noncoding RNA (sncRNA) 5' transfer RNA (tRNA) half
cgggttcgattcccgggcggcgcatg

SEQ ID NO: 22462 - DNA, 11 bp, Artificial Sequence
  synthetic circulating small noncoding RNA (sncRNA) 5' transfer RNA (tRNA) half
taagcgcccga

SEQ ID NO: 22463 - DNA, 11 bp, Artificial Sequence
  synthetic circulating small noncoding RNA (sncRNA) 5' transfer RNA (tRNA) half
tgagctaaccg

SEQ ID NO: 22464 - DNA, 33 bp, Artificial Sequence
  synthetic circulating small noncoding RNA (sncRNA) 5' transfer RNA (tRNA) half
cggttccatagtgtagcggttatcacgtctgct

SEQ ID NO: 22465 - DNA, 13 bp, Artificial Sequence
  synthetic circulating small noncoding RNA (sncRNA) 5' transfer RNA (tRNA) half
gtcagacgcctta

SEQ ID NO: 22466 - DNA, 32 bp, Artificial Sequence
  synthetic circulating small noncoding RNA (sncRNA) 5' transfer RNA (tRNA) half
ggccacaacgcagagtactaaccactatacga

SEQ ID NO: 22467 - DNA, 30 bp, Artificial Sequence
  synthetic circulating small noncoding RNA (sncRNA) 5' transfer RNA (tRNA) half
acggggatcgaacccgcgaccttggcgtta

SEQ ID NO: 22468 - DNA, 14 bp, Artificial Sequence
  synthetic circulating small noncoding RNA (sncRNA) 5' transfer RNA (tRNA) half
gtggcagcggtggg

SEQ ID NO: 22469 - DNA, 14 bp, Artificial Sequence
  synthetic circulating small noncoding RNA (sncRNA) 5' transfer RNA (tRNA) half
gttcgaacccacga

SEQ ID NO: 22470 - DNA, 16 bp, Artificial Sequence
  synthetic circulating small noncoding RNA (sncRNA) 5' transfer RNA (tRNA) half
gcggtgggattcgaac

SEQ ID NO: 22471 - DNA, 32 bp, Artificial Sequence
  synthetic circulating small noncoding RNA (sncRNA) 5' transfer RNA (tRNA) half
ccccgcgcaggttcgaatcctgctcacagcgc

SEQ ID NO: 22472 - DNA, 22 bp, Artificial Sequence
  synthetic circulating small noncoding RNA (sncRNA) 5' transfer RNA (tRNA) half
atgccgtgactcggattcgaac

SEQ ID NO: 22473 - DNA, 30 bp, Artificial Sequence
  synthetic circulating small noncoding RNA (sncRNA) 5' transfer RNA (tRNA) half
agggattgtgggttcgagtcccacctgggg

SEQ ID NO: 22474 - DNA, 10 bp, Artificial Sequence
  synthetic circulating small noncoding RNA (sncRNA) 5' transfer RNA (tRNA) half
gggagaccgg

SEQ ID NO: 22475 - DNA, 28 bp, Artificial Sequence
  synthetic circulating small noncoding RNA (sncRNA) 5' transfer RNA (tRNA) half
ggtctcccgcgtgacaggcggggatact

SEQ ID NO: 22476 - DNA, 15 bp, Artificial Sequence
  synthetic circulating small noncoding RNA (sncRNA) 5' transfer RNA (tRNA) half
gccatcctgacactt

SEQ ID NO: 22477 - DNA, 16 bp, Artificial Sequence
  synthetic circulating small noncoding RNA (sncRNA) 5' transfer RNA (tRNA) half
ctatacgatcacggcg

SEQ ID NO: 22478 - DNA, 33 bp, Artificial Sequence
  synthetic circulating small noncoding RNA (sncRNA) 5' transfer RNA (tRNA) half
gagcattggtggttcagtggtagaattctcgcc

SEQ ID NO: 22479 - DNA, 13 bp, Artificial Sequence
  synthetic circulating small noncoding RNA (sncRNA) 5' transfer RNA (tRNA) half
aaaggtccccggt

SEQ ID NO: 22480 - DNA, 16 bp, Artificial Sequence
  synthetic circulating small noncoding RNA (sncRNA) 5' transfer RNA (tRNA) half
ccacaccgggagtcga

SEQ ID NO: 22481 - DNA, 20 bp, Artificial Sequence
  synthetic circulating small noncoding RNA (sncRNA) 5' transfer RNA (tRNA) half
agttcaaatctcggtgggac

SEQ ID NO: 22482 - DNA, 23 bp, Artificial Sequence
  synthetic circulating small noncoding RNA (sncRNA) 5' transfer RNA (tRNA) half
tggttaggattcggcgctctcac

SEQ ID NO: 22483 - DNA, 30 bp, Artificial Sequence
  synthetic circulating small noncoding RNA (sncRNA) 5' transfer RNA (tRNA) half
gctggattcaaagtccagagtgctaaccat

SEQ ID NO: 22484 - DNA, 24 bp, Artificial Sequence
  synthetic circulating small noncoding RNA (sncRNA) 5' transfer RNA (tRNA) half
tcccggccaatgcactctctcact

SEQ ID NO: 22485 - DNA, 13 bp, Artificial Sequence
  synthetic circulating small noncoding RNA (sncRNA) 5' transfer RNA (tRNA) half
aaccctcaatctt

SEQ ID NO: 22486 - DNA, 23 bp, Artificial Sequence
  synthetic circulating small noncoding RNA (sncRNA) 5' transfer RNA (tRNA) half
gattccggctcgaaggacttcgt

SEQ ID NO: 22487 - DNA, 34 bp, Artificial Sequence
  synthetic circulating small noncoding RNA (sncRNA) 5' transfer RNA (tRNA) half
tcggggaatcgaaccccggtctcccgcgtgacag

SEQ ID NO: 22488 - DNA, 12 bp, Artificial Sequence
  synthetic circulating small noncoding RNA (sncRNA) 5' transfer RNA (tRNA) half
cgccgcggcccg

SEQ ID NO: 22489 - DNA, 18 bp, Artificial Sequence
  synthetic circulating small noncoding RNA (sncRNA) 5' transfer RNA (tRNA) half
cgatcccgggtttcggca

SEQ ID NO: 22490 - DNA, 7 bp, Artificial Sequence
  synthetic circulating small noncoding RNA (sncRNA) 5' transfer RNA (tRNA) half
ccggacg

SEQ ID NO: 22491 - DNA, 37 bp, Artificial Sequence
  synthetic circulating small noncoding RNA (sncRNA) 5' transfer RNA (tRNA) half
aggtcccaccgagatttgaactcggatcgctggattc

SEQ ID NO: 22492 - DNA, 25 bp, Artificial Sequence
  synthetic circulating small noncoding RNA (sncRNA) 5' transfer RNA (tRNA) half
agtggttaggattcggcgctctcac

SEQ ID NO: 22493 - DNA, 11 bp, Artificial Sequence
  synthetic circulating small noncoding RNA (sncRNA) 5' transfer RNA (tRNA) half
cgccaaggtcg

SEQ ID NO: 22494 - DNA, 28 bp, Artificial Sequence
  synthetic circulating small noncoding RNA (sncRNA) 5' transfer RNA (tRNA) half
gcggggatactcaccactatactaacga

SEQ ID NO: 22495 - DNA, 15 bp, Artificial Sequence
  synthetic circulating small noncoding RNA (sncRNA) 5' transfer RNA (tRNA) half
ccgactgagctatcc

SEQ ID NO: 22496 - DNA, 19 bp, Artificial Sequence
  synthetic circulating small noncoding RNA (sncRNA) 5' transfer RNA (tRNA) half
ggttctgggttcgagtccc

SEQ ID NO: 22497 - DNA, 12 bp, Artificial Sequence
  synthetic circulating small noncoding RNA (sncRNA) 5' transfer RNA (tRNA) half
ggtatgattctc

SEQ ID NO: 22498 - DNA, 20 bp, Artificial Sequence
  synthetic circulating small noncoding RNA (sncRNA) 5' transfer RNA (tRNA) half
tgtccattggatcttaagtc

SEQ ID NO: 22499 - DNA, 13 bp, Artificial Sequence
  synthetic circulating small noncoding RNA (sncRNA) 5' transfer RNA (tRNA) half
tggcgcccaacgt

SEQ ID NO: 22500 - DNA, 11 bp, Artificial Sequence
  synthetic circulating small noncoding RNA (sncRNA) 5' transfer RNA (tRNA) half
aggatggccga

SEQ ID NO: 22501 - DNA, 25 bp, Artificial Sequence
  synthetic circulating small noncoding RNA (sncRNA) 5' transfer RNA (tRNA) half
agcactctggactctgaatccagcg

SEQ ID NO: 22502 - DNA, 21 bp, Artificial Sequence
  synthetic circulating small noncoding RNA (sncRNA) 5' transfer RNA (tRNA) half
tcgattcccggtcagggaagc

SEQ ID NO: 22503 - DNA, 15 bp, Artificial Sequence
  synthetic circulating small noncoding RNA (sncRNA) 5' transfer RNA (tRNA) half
actctgctacccact

SEQ ID NO: 22504 - DNA, 17 bp, Artificial Sequence
  synthetic circulating small noncoding RNA (sncRNA) 5' transfer RNA (tRNA) half
gccacctcgtcctctct

SEQ ID NO: 22505 - DNA, 17 bp, Artificial Sequence
  synthetic circulating small noncoding RNA (sncRNA) 5' transfer RNA (tRNA) half
aaaactgggctcgtccg

SEQ ID NO: 22506 - DNA, 16 bp, Artificial Sequence
  synthetic circulating small noncoding RNA (sncRNA) 5' transfer RNA (tRNA) half
tcgattcccgggcggc

SEQ ID NO: 22507 - DNA, 35 bp, Artificial Sequence
  synthetic circulating small noncoding RNA (sncRNA) 5' transfer RNA (tRNA) half
gtagggggcacccggatttgaaccggggacctctt

SEQ ID NO: 22508 - DNA, 30 bp, Artificial Sequence
  synthetic circulating small noncoding RNA (sncRNA) 5' transfer RNA (tRNA) half
agtgtagtggttatcacgttcgcctcacac

SEQ ID NO: 22509 - DNA, 11 bp, Artificial Sequence
  synthetic circulating small noncoding RNA (sncRNA) 5' transfer RNA (tRNA) half
gggttcgaatc

SEQ ID NO: 22510 - DNA, 35 bp, Artificial Sequence
  synthetic circulating small noncoding RNA (sncRNA) 5' transfer RNA (tRNA) half
cccgggtgggactcgaacccacaatccctggctta

SEQ ID NO: 22511 - DNA, 22 bp, Artificial Sequence
  synthetic circulating small noncoding RNA (sncRNA) 5' transfer RNA (tRNA) half
taatctgaaggtcctgagttcg

SEQ ID NO: 22512 - DNA, 15 bp, Artificial Sequence
  synthetic circulating small noncoding RNA (sncRNA) 5' transfer RNA (tRNA) half
gtgagaggtagcggg

SEQ ID NO: 22513 - DNA, 15 bp, Artificial Sequence
  synthetic circulating small noncoding RNA (sncRNA) 5' transfer RNA (tRNA) half
ccaccaacctttcgg

SEQ ID NO: 22514 - DNA, 20 bp, Artificial Sequence
  synthetic circulating small noncoding RNA (sncRNA) 5' transfer RNA (tRNA) half
aaaaaggaactggagatgcc

SEQ ID NO: 22515 - DNA, 24 bp, Artificial Sequence
  synthetic circulating small noncoding RNA (sncRNA) 5' transfer RNA (tRNA) half
gtatgattctcgcttcgggtgcga

SEQ ID NO: 22516 - DNA, 18 bp, Artificial Sequence
  synthetic circulating small noncoding RNA (sncRNA) 5' transfer RNA (tRNA) half
aatcccggacgagccctg

SEQ ID NO: 22517 - DNA, 24 bp, Artificial Sequence
  synthetic circulating small noncoding RNA (sncRNA) 5' transfer RNA (tRNA) half
ctgggttcgaatcccagcggtgcc

SEQ ID NO: 22518 - DNA, 23 bp, Artificial Sequence
  synthetic circulating small noncoding RNA (sncRNA) 5' transfer RNA (tRNA) half
aaaatgctaaggttccaccgaga

SEQ ID NO: 22519 - DNA, 13 bp, Artificial Sequence
  synthetic circulating small noncoding RNA (sncRNA) 5' transfer RNA (tRNA) half
cgcgacccctggt

SEQ ID NO: 22520 - DNA, 21 bp, Artificial Sequence
  synthetic circulating small noncoding RNA (sncRNA) 5' transfer RNA (tRNA) half
taaccactcggccatcgctgc

SEQ ID NO: 22521 - DNA, 29 bp, Artificial Sequence
  synthetic circulating small noncoding RNA (sncRNA) 5' transfer RNA (tRNA) half
ggattcctggttttcacccaggcggcccg

SEQ ID NO: 22522 - DNA, 15 bp, Artificial Sequence
  synthetic circulating small noncoding RNA (sncRNA) 5' transfer RNA (tRNA) half
ccgggcggaaacaac

SEQ ID NO: 22523 - DNA, 22 bp, Artificial Sequence
  synthetic circulating small noncoding RNA (sncRNA) 5' transfer RNA (tRNA) half
tggtggtctagtggttaggatt

SEQ ID NO: 22524 - DNA, 25 bp, Artificial Sequence
  synthetic circulating small noncoding RNA (sncRNA) 5' transfer RNA (tRNA) half
cataacccagaggtcgatggatcga

SEQ ID NO: 22525 - DNA, 18 bp, Artificial Sequence
  synthetic circulating small noncoding RNA (sncRNA) 5' transfer RNA (tRNA) half
aacccacgcagacatatg

SEQ ID NO: 22526 - DNA, 32 bp, Artificial Sequence
  synthetic circulating small noncoding RNA (sncRNA) 5' transfer RNA (tRNA) half
cggcccgggttcgactcccggtatgggaacag

SEQ ID NO: 22527 - DNA, 26 bp, Artificial Sequence
  synthetic circulating small noncoding RNA (sncRNA) 5' transfer RNA (tRNA) half
gagccagccaggagtcgaacctggaa

SEQ ID NO: 22528 - DNA, 19 bp, Artificial Sequence
  synthetic circulating small noncoding RNA (sncRNA) 5' transfer RNA (tRNA) half
tcgattcccggccaacgca

SEQ ID NO: 22529 - DNA, 37 bp, Artificial Sequence
  synthetic circulating small noncoding RNA (sncRNA) 5' transfer RNA (tRNA) half
tgtcgtccctgggtgggctcgaaccaccaacctttcg

SEQ ID NO: 22530 - DNA, 14 bp, Artificial Sequence
  synthetic circulating small noncoding RNA (sncRNA) 5' transfer RNA (tRNA) half
atggccgagcggtc

SEQ ID NO: 22531 - DNA, 12 bp, Artificial Sequence
  synthetic circulating small noncoding RNA (sncRNA) 5' transfer RNA (tRNA) half
agcgcgttcggc

SEQ ID NO: 22532 - DNA, 17 bp, Artificial Sequence
  synthetic circulating small noncoding RNA (sncRNA) 5' transfer RNA (tRNA) half
aaaaccaggaatcctaa

SEQ ID NO: 22533 - DNA, 19 bp, Artificial Sequence
  synthetic circulating small noncoding RNA (sncRNA) 5' transfer RNA (tRNA) half
agctgtcagaagtgggatt

SEQ ID NO: 22534 - DNA, 23 bp, Artificial Sequence
  synthetic circulating small noncoding RNA (sncRNA) 5' transfer RNA (tRNA) half
ctctgaatccagcgacccgagtt

SEQ ID NO: 22535 - DNA, 12 bp, Artificial Sequence
  synthetic circulating small noncoding RNA (sncRNA) 5' transfer RNA (tRNA) half
tggcgcagcgga

SEQ ID NO: 22536 - DNA, 13 bp, Artificial Sequence
  synthetic circulating small noncoding RNA (sncRNA) 5' transfer RNA (tRNA) half
ttttcacccaggc

SEQ ID NO: 22537 - DNA, 20 bp, Artificial Sequence
  synthetic circulating small noncoding RNA (sncRNA) 5' transfer RNA (tRNA) half
gttcgagccccacgttgggc

SEQ ID NO: 22538 - DNA, 26 bp, Artificial Sequence
  synthetic circulating small noncoding RNA (sncRNA) 5' transfer RNA (tRNA) half
gttggtctaggggtatgattctcgct

SEQ ID NO: 22539 - DNA, 16 bp, Artificial Sequence
  synthetic circulating small noncoding RNA (sncRNA) 5' transfer RNA (tRNA) half
aacctacaatcttctg

SEQ ID NO: 22540 - DNA, 18 bp, Artificial Sequence
  synthetic circulating small noncoding RNA (sncRNA) 5' transfer RNA (tRNA) half
cgaacccaggatctcctg

SEQ ID NO: 22541 - DNA, 17 bp, Artificial Sequence
  synthetic circulating small noncoding RNA (sncRNA) 5' transfer RNA (tRNA) half
ttcggctgttaaccgaa

SEQ ID NO: 22542 - DNA, 20 bp, Artificial Sequence
  synthetic circulating small noncoding RNA (sncRNA) 5' transfer RNA (tRNA) half
tgcgagaggtcccgggttca

SEQ ID NO: 22543 - DNA, 11 bp, Artificial Sequence
  synthetic circulating small noncoding RNA (sncRNA) 5' transfer RNA (tRNA) half
tagcgcgtctg

SEQ ID NO: 22544 - DNA, 15 bp, Artificial Sequence
  synthetic circulating small noncoding RNA (sncRNA) 5' transfer RNA (tRNA) half
cccataccgggagtc

SEQ ID NO: 22545 - DNA, 34 bp, Artificial Sequence
  synthetic circulating small noncoding RNA (sncRNA) 5' transfer RNA (tRNA) half
gtcccaccgagatttgaactcggatcgctggatt

SEQ ID NO: 22546 - DNA, 17 bp, Artificial Sequence
  synthetic circulating small noncoding RNA (sncRNA) 5' transfer RNA (tRNA) half
aatctcggtgggacctc

SEQ ID NO: 22547 - DNA, 24 bp, Artificial Sequence
  synthetic circulating small noncoding RNA (sncRNA) 5' transfer RNA (tRNA) half
ccttaaccactcggccatcgctgc

SEQ ID NO: 22548 - DNA, 24 bp, Artificial Sequence
  synthetic circulating small noncoding RNA (sncRNA) 5' transfer RNA (tRNA) half
atcgtataggggttagtactctgc

SEQ ID NO: 22549 - DNA, 8 bp, Artificial Sequence
  synthetic circulating small noncoding RNA (sncRNA) 5' transfer RNA (tRNA) half
cgcctacg

SEQ ID NO: 22550 - DNA, 9 bp, Artificial Sequence
  synthetic circulating small noncoding RNA (sncRNA) 5' transfer RNA (tRNA) half
cggggacct

SEQ ID NO: 22551 - DNA, 9 bp, Artificial Sequence
  synthetic circulating small noncoding RNA (sncRNA) 5' transfer RNA (tRNA) half
ccctgaccg

SEQ ID NO: 22552 - DNA, 9 bp, Artificial Sequence
  synthetic circulating small noncoding RNA (sncRNA) 5' transfer RNA (tRNA) half
ttaaggcga

SEQ ID NO: 22553 - DNA, 16 bp, Artificial Sequence
  synthetic circulating small noncoding RNA (sncRNA) 5' transfer RNA (tRNA) half
atctcgctggggcctg

SEQ ID NO: 22554 - DNA, 20 bp, Artificial Sequence
  synthetic circulating small noncoding RNA (sncRNA) 5' transfer RNA (tRNA) half
gtggttatcacgttcgccta

SEQ ID NO: 22555 - DNA, 13 bp, Artificial Sequence
  synthetic circulating small noncoding RNA (sncRNA) 5' transfer RNA (tRNA) half
gaatcgaacccgg

SEQ ID NO: 22556 - DNA, 35 bp, Artificial Sequence
  synthetic circulating small noncoding RNA (sncRNA) 5' transfer RNA (tRNA) half
ttaggattcctggttttcacccaggcggcccgggt

SEQ ID NO: 22557 - DNA, 10 bp, Artificial Sequence
  synthetic circulating small noncoding RNA (sncRNA) 5' transfer RNA (tRNA) half
gacgaggatg

SEQ ID NO: 22558 - DNA, 40 bp, Artificial Sequence
  synthetic circulating small noncoding RNA (sncRNA) 5' transfer RNA (tRNA) half
cggctagctcagtcggtagagcatgagactcttaatctca

SEQ ID NO: 22559 - DNA, 10 bp, Artificial Sequence
  synthetic circulating small noncoding RNA (sncRNA) 5' transfer RNA (tRNA) half
acgcccccga

SEQ ID NO: 22560 - DNA, 16 bp, Artificial Sequence
  synthetic circulating small noncoding RNA (sncRNA) 5' transfer RNA (tRNA) half
atgaggccccgggttc

SEQ ID NO: 22561 - DNA, 37 bp, Artificial Sequence
  synthetic circulating small noncoding RNA (sncRNA) 5' transfer RNA (tRNA) half
tgttcccgcccggtttcgaaccggggacctctcgcgt

SEQ ID NO: 22562 - DNA, 43 bp, Artificial Sequence
  synthetic circulating small noncoding RNA (sncRNA) 5' transfer RNA (tRNA) half
cggatgatcctcagtggtctggggtgcaggcttcaaacctgta

SEQ ID NO: 22563 - DNA, 29 bp, Artificial Sequence
  synthetic circulating small noncoding RNA (sncRNA) 5' transfer RNA (tRNA) half
tagtgccgagactcggattcgaaccgagg

SEQ ID NO: 22564 - DNA, 17 bp, Artificial Sequence
  synthetic circulating small noncoding RNA (sncRNA) 5' transfer RNA (tRNA) half
ctcacgaccttcagatt

SEQ ID NO: 22565 - DNA, 16 bp, Artificial Sequence
  synthetic circulating small noncoding RNA (sncRNA) 5' transfer RNA (tRNA) half
agattaagagtctcat

SEQ ID NO: 22566 - DNA, 23 bp, Artificial Sequence
  synthetic circulating small noncoding RNA (sncRNA) 5' transfer RNA (tRNA) half
ttcgattccccgacggggagtct

SEQ ID NO: 22567 - DNA, 14 bp, Artificial Sequence
  synthetic circulating small noncoding RNA (sncRNA) 5' transfer RNA (tRNA) half
ggtctaggggtatg

SEQ ID NO: 22568 - DNA, 30 bp, Artificial Sequence
  synthetic circulating small noncoding RNA (sncRNA) 5' transfer RNA (tRNA) half
aatccagcgatccgagttcaaatctcggtg

SEQ ID NO: 22569 - DNA, 25 bp, Artificial Sequence
  synthetic circulating small noncoding RNA (sncRNA) 5' transfer RNA (tRNA) half
ccggggatcgaacccggggcctcat

SEQ ID NO: 22570 - DNA, 14 bp, Artificial Sequence
  synthetic circulating small noncoding RNA (sncRNA) 5' transfer RNA (tRNA) half
tggtctggggtgca

SEQ ID NO: 22571 - DNA, 30 bp, Artificial Sequence
  synthetic circulating small noncoding RNA (sncRNA) 5' transfer RNA (tRNA) half
cgagaattctaccactgaaccaccaatgcg

SEQ ID NO: 22572 - DNA, 18 bp, Artificial Sequence
  synthetic circulating small noncoding RNA (sncRNA) 5' transfer RNA (tRNA) half
ggttccatagtgtagcgg

SEQ ID NO: 22573 - DNA, 37 bp, Artificial Sequence
  synthetic circulating small noncoding RNA (sncRNA) 5' transfer RNA (tRNA) half
gtctgatgctctaccgactgagctatccgggctctta

SEQ ID NO: 22574 - DNA, 13 bp, Artificial Sequence
  synthetic circulating small noncoding RNA (sncRNA) 5' transfer RNA (tRNA) half
cgtgtgaggcgaa

SEQ ID NO: 22575 - DNA, 33 bp, Artificial Sequence
  synthetic circulating small noncoding RNA (sncRNA) 5' transfer RNA (tRNA) half
gggcctcatacatgcaaagcatgcgctctacca

SEQ ID NO: 22576 - DNA, 36 bp, Artificial Sequence
  synthetic circulating small noncoding RNA (sncRNA) 5' transfer RNA (tRNA) half
tgaactcggatcgctggattcagagtccagagtgct

SEQ ID NO: 22577 - DNA, 20 bp, Artificial Sequence
  synthetic circulating small noncoding RNA (sncRNA) 5' transfer RNA (tRNA) half
cgaactcacaacctcggcat

SEQ ID NO: 22578 - DNA, 10 bp, Artificial Sequence
  synthetic circulating small noncoding RNA (sncRNA) 5' transfer RNA (tRNA) half
ctgaggttcg

SEQ ID NO: 22579 - DNA, 14 bp, Artificial Sequence
  synthetic circulating small noncoding RNA (sncRNA) 5' transfer RNA (tRNA) half
aagattgagggttc

SEQ ID NO: 22580 - DNA, 9 bp, Artificial Sequence
  synthetic circulating small noncoding RNA (sncRNA) 5' transfer RNA (tRNA) half
gaacccacg

SEQ ID NO: 22581 - DNA, 22 bp, Artificial Sequence
  synthetic circulating small noncoding RNA (sncRNA) 5' transfer RNA (tRNA) half
aggttcgagtcctgccgcggtc

SEQ ID NO: 22582 - DNA, 11 bp, Artificial Sequence
  synthetic circulating small noncoding RNA (sncRNA) 5' transfer RNA (tRNA) half
tcacgtcgggg

SEQ ID NO: 22583 - DNA, 16 bp, Artificial Sequence
  synthetic circulating small noncoding RNA (sncRNA) 5' transfer RNA (tRNA) half
ccagcgccttagaccg

SEQ ID NO: 22584 - DNA, 21 bp, Artificial Sequence
  synthetic circulating small noncoding RNA (sncRNA) 5' transfer RNA (tRNA) half
tcaaagtccagagtgctaacc

SEQ ID NO: 22585 - DNA, 34 bp, Artificial Sequence
  synthetic circulating small noncoding RNA (sncRNA) 5' transfer RNA (tRNA) half
ccacgaccctgggattaagagtcccatgctctac

SEQ ID NO: 22586 - DNA, 14 bp, Artificial Sequence
  synthetic circulating small noncoding RNA (sncRNA) 5' transfer RNA (tRNA) half
gcgcccaacgtgag

SEQ ID NO: 22587 - DNA, 27 bp, Artificial Sequence
  synthetic circulating small noncoding RNA (sncRNA) 5' transfer RNA (tRNA) half
aaaggcaccgctgggattcgaacccag

SEQ ID NO: 22588 - DNA, 32 bp, Artificial Sequence
  synthetic circulating small noncoding RNA (sncRNA) 5' transfer RNA (tRNA) half
gtccaacgccttaaccactcggccaccgtgac

SEQ ID NO: 22589 - DNA, 16 bp, Artificial Sequence
  synthetic circulating small noncoding RNA (sncRNA) 5' transfer RNA (tRNA) half
tgaacccgggacctct

SEQ ID NO: 22590 - DNA, 13 bp, Artificial Sequence
  synthetic circulating small noncoding RNA (sncRNA) 5' transfer RNA (tRNA) half
cggggctcgaacc

SEQ ID NO: 22591 - DNA, 21 bp, Artificial Sequence
  synthetic circulating small noncoding RNA (sncRNA) 5' transfer RNA (tRNA) half
cctaagccagggattgtgggt

SEQ ID NO: 22592 - DNA, 5 bp, Artificial Sequence
  synthetic circulating small noncoding RNA (sncRNA) 5' transfer RNA (tRNA) half
cgacg

SEQ ID NO: 22593 - DNA, 32 bp, Artificial Sequence
  synthetic circulating small noncoding RNA (sncRNA) 5' transfer RNA (tRNA) half
atgagcccggatagctcagtcggtagagcatc

SEQ ID NO: 22594 - DNA, 12 bp, Artificial Sequence
  synthetic circulating small noncoding RNA (sncRNA) 5' transfer RNA (tRNA) half
ctcggccattct

SEQ ID NO: 22595 - DNA, 16 bp, Artificial Sequence
  synthetic circulating small noncoding RNA (sncRNA) 5' transfer RNA (tRNA) half
acccgggtcacccgcg

SEQ ID NO: 22596 - DNA, 22 bp, Artificial Sequence
  synthetic circulating small noncoding RNA (sncRNA) 5' transfer RNA (tRNA) half
tgaccccgacgtgacttgaaca

SEQ ID NO: 22597 - DNA, 14 bp, Artificial Sequence
  synthetic circulating small noncoding RNA (sncRNA) 5' transfer RNA (tRNA) half
gcgggttcgaaccc

SEQ ID NO: 22598 - DNA, 12 bp, Artificial Sequence
  synthetic circulating small noncoding RNA (sncRNA) 5' transfer RNA (tRNA) half
cgagcgctctac

SEQ ID NO: 22599 - DNA, 15 bp, Artificial Sequence
  synthetic circulating small noncoding RNA (sncRNA) 5' transfer RNA (tRNA) half
gctcagttggttaga

SEQ ID NO: 22600 - DNA, 25 bp, Artificial Sequence
  synthetic circulating small noncoding RNA (sncRNA) 5' transfer RNA (tRNA) half
gtgggttcgagtcccatctggggtg

SEQ ID NO: 22601 - DNA, 14 bp, Artificial Sequence
  synthetic circulating small noncoding RNA (sncRNA) 5' transfer RNA (tRNA) half
cggtgagagcgcca

SEQ ID NO: 22602 - DNA, 31 bp, Artificial Sequence
  synthetic circulating small noncoding RNA (sncRNA) 5' transfer RNA (tRNA) half
atatggtctagcggttaggattcctggtttt

SEQ ID NO: 22603 - DNA, 18 bp, Artificial Sequence
  synthetic circulating small noncoding RNA (sncRNA) 5' transfer RNA (tRNA) half
cgagtcccatctgggtcg

SEQ ID NO: 22604 - DNA, 14 bp, Artificial Sequence
  synthetic circulating small noncoding RNA (sncRNA) 5' transfer RNA (tRNA) half
gttcgaatcctgct

SEQ ID NO: 22605 - DNA, 29 bp, Artificial Sequence
  synthetic circulating small noncoding RNA (sncRNA) 5' transfer RNA (tRNA) half
ggtcctgggttcgagccccagtggaacca

SEQ ID NO: 22606 - DNA, 15 bp, Artificial Sequence
  synthetic circulating small noncoding RNA (sncRNA) 5' transfer RNA (tRNA) half
ggttccttcgagccg

SEQ ID NO: 22607 - DNA, 16 bp, Artificial Sequence
  synthetic circulating small noncoding RNA (sncRNA) 5' transfer RNA (tRNA) half
aggcaagaattctacc

SEQ ID NO: 22608 - DNA, 15 bp, Artificial Sequence
  synthetic circulating small noncoding RNA (sncRNA) 5' transfer RNA (tRNA) half
cagttgacccgggtt

SEQ ID NO: 22609 - DNA, 25 bp, Artificial Sequence
  synthetic circulating small noncoding RNA (sncRNA) 5' transfer RNA (tRNA) half
ccgtagtgtagtggttatcacgttc

SEQ ID NO: 22610 - DNA, 32 bp, Artificial Sequence
  synthetic circulating small noncoding RNA (sncRNA) 5' transfer RNA (tRNA) half
gcctgggtgaaaaccaggaatcctaaccgcta

SEQ ID NO: 22611 - DNA, 28 bp, Artificial Sequence
  synthetic circulating small noncoding RNA (sncRNA) 5' transfer RNA (tRNA) half
gggttatgggcccagcacgcttccgctg

SEQ ID NO: 22612 - DNA, 13 bp, Artificial Sequence
  synthetic circulating small noncoding RNA (sncRNA) 5' transfer RNA (tRNA) half
tcgactcccggca

SEQ ID NO: 22613 - DNA, 19 bp, Artificial Sequence
  synthetic circulating small noncoding RNA (sncRNA) 5' transfer RNA (tRNA) half
tgacaggcggggatactaa

SEQ ID NO: 22614 - DNA, 8 bp, Artificial Sequence
  synthetic circulating small noncoding RNA (sncRNA) 5' transfer RNA (tRNA) half
ggcccgta

SEQ ID NO: 22615 - DNA, 13 bp, Artificial Sequence
  synthetic circulating small noncoding RNA (sncRNA) 5' transfer RNA (tRNA) half
gcctgtcacgcgg

SEQ ID NO: 22616 - DNA, 39 bp, Artificial Sequence
  synthetic circulating small noncoding RNA (sncRNA) 5' transfer RNA (tRNA) half
acttccctgaccgggaatcgaacccgggccgcggcggtg

SEQ ID NO: 22617 - DNA, 11 bp, Artificial Sequence
  synthetic circulating small noncoding RNA (sncRNA) 5' transfer RNA (tRNA) half
acgcagagtac

SEQ ID NO: 22618 - DNA, 34 bp, Artificial Sequence
  synthetic circulating small noncoding RNA (sncRNA) 5' transfer RNA (tRNA) half
agcgtgctgggcccataacccagaggtcgatgga

SEQ ID NO: 22619 - DNA, 23 bp, Artificial Sequence
  synthetic circulating small noncoding RNA (sncRNA) 5' transfer RNA (tRNA) half
tcgaatcccatcctcgtccgaag

SEQ ID NO: 22620 - DNA, 20 bp, Artificial Sequence
  synthetic circulating small noncoding RNA (sncRNA) 5' transfer RNA (tRNA) half
gtgtcagaagtgggattcga

SEQ ID NO: 22621 - DNA, 14 bp, Artificial Sequence
  synthetic circulating small noncoding RNA (sncRNA) 5' transfer RNA (tRNA) half
cggatttgaaccgg

SEQ ID NO: 22622 - DNA, 14 bp, Artificial Sequence
  synthetic circulating small noncoding RNA (sncRNA) 5' transfer RNA (tRNA) half
aacccgggtcaact

SEQ ID NO: 22623 - DNA, 42 bp, Artificial Sequence
  synthetic circulating small noncoding RNA (sncRNA) 5' transfer RNA (tRNA) half
tcccacatggtctagcggttaggattcctggttttcacccag

SEQ ID NO: 22624 - DNA, 22 bp, Artificial Sequence
  synthetic circulating small noncoding RNA (sncRNA) 5' transfer RNA (tRNA) half
aagattccaggttcgactcctg

SEQ ID NO: 22625 - DNA, 24 bp, Artificial Sequence
  synthetic circulating small noncoding RNA (sncRNA) 5' transfer RNA (tRNA) half
tgggttcgagtcccatctggggtg

SEQ ID NO: 22626 - DNA, 17 bp, Artificial Sequence
  synthetic circulating small noncoding RNA (sncRNA) 5' transfer RNA (tRNA) half
gaggctcgaactcacaa

SEQ ID NO: 22627 - DNA, 19 bp, Artificial Sequence
  synthetic circulating small noncoding RNA (sncRNA) 5' transfer RNA (tRNA) half
cctgtcacgcgggagaccg

SEQ ID NO: 22628 - DNA, 13 bp, Artificial Sequence
  synthetic circulating small noncoding RNA (sncRNA) 5' transfer RNA (tRNA) half
gcggggatactaa

SEQ ID NO: 22629 - DNA, 30 bp, Artificial Sequence
  synthetic circulating small noncoding RNA (sncRNA) 5' transfer RNA (tRNA) half
tgaaggccccagcgagatttgaactcgcga

SEQ ID NO: 22630 - DNA, 24 bp, Artificial Sequence
  synthetic circulating small noncoding RNA (sncRNA) 5' transfer RNA (tRNA) half
gaacccgcgaccttggcgttatta

SEQ ID NO: 22631 - DNA, 22 bp, Artificial Sequence
  synthetic circulating small noncoding RNA (sncRNA) 5' transfer RNA (tRNA) half
tggttatcacgttcgcctaaca

SEQ ID NO: 22632 - DNA, 35 bp, Artificial Sequence
  synthetic circulating small noncoding RNA (sncRNA) 5' transfer RNA (tRNA) half
caggagatcctgggttcgaatcccagcggtgcctg

SEQ ID NO: 22633 - DNA, 37 bp, Artificial Sequence
  synthetic circulating small noncoding RNA (sncRNA) 5' transfer RNA (tRNA) half
aacaggagatcctgggttcgaatcccagcggggcctt

SEQ ID NO: 22634 - DNA, 10 bp, Artificial Sequence
  synthetic circulating small noncoding RNA (sncRNA) 5' transfer RNA (tRNA) half
gaggcccggg

SEQ ID NO: 22635 - DNA, 6 bp, Artificial Sequence
  synthetic circulating small noncoding RNA (sncRNA) 5' transfer RNA (tRNA) half
gacctt

SEQ ID NO: 22636 - DNA, 17 bp, Artificial Sequence
  synthetic circulating small noncoding RNA (sncRNA) 5' transfer RNA (tRNA) half
agtcgaacctggaatct

SEQ ID NO: 22637 - DNA, 32 bp, Artificial Sequence
  synthetic circulating small noncoding RNA (sncRNA) 5' transfer RNA (tRNA) half
caagaggtccccggttcaaatccgggtgcccc

SEQ ID NO: 22638 - DNA, 32 bp, Artificial Sequence
  synthetic circulating small noncoding RNA (sncRNA) 5' transfer RNA (tRNA) half
actctggactctgaatccagcgacccgagttc

SEQ ID NO: 22639 - DNA, 8 bp, Artificial Sequence
  synthetic circulating small noncoding RNA (sncRNA) 5' transfer RNA (tRNA) half
catcccca

SEQ ID NO: 22640 - DNA, 19 bp, Artificial Sequence
  synthetic circulating small noncoding RNA (sncRNA) 5' transfer RNA (tRNA) half
caagtgcattggccgggaa

SEQ ID NO: 22641 - DNA, 24 bp, Artificial Sequence
  synthetic circulating small noncoding RNA (sncRNA) 5' transfer RNA (tRNA) half
gcgaacgtgataaccactacacta

SEQ ID NO: 22642 - DNA, 23 bp, Artificial Sequence
  synthetic circulating small noncoding RNA (sncRNA) 5' transfer RNA (tRNA) half
ggtgagcactctggactctgaat

SEQ ID NO: 22643 - DNA, 25 bp, Artificial Sequence
  synthetic circulating small noncoding RNA (sncRNA) 5' transfer RNA (tRNA) half
cgtgtttccgcccggtttcgaaccg

SEQ ID NO: 22644 - DNA, 11 bp, Artificial Sequence
  synthetic circulating small noncoding RNA (sncRNA) 5' transfer RNA (tRNA) half
cgctctcggtg

SEQ ID NO: 22645 - DNA, 24 bp, Artificial Sequence
  synthetic circulating small noncoding RNA (sncRNA) 5' transfer RNA (tRNA) half
cgtagtgtagtggttatcacgctc

SEQ ID NO: 22646 - DNA, 40 bp, Artificial Sequence
  synthetic circulating small noncoding RNA (sncRNA) 5' transfer RNA (tRNA) half
gacttaaaaccttgttcccagaggttcaaatcctctccct

SEQ ID NO: 22647 - DNA, 26 bp, Artificial Sequence
  synthetic circulating small noncoding RNA (sncRNA) 5' transfer RNA (tRNA) half
gccccctctgaggttcgaactcagga

SEQ ID NO: 22648 - DNA, 44 bp, Artificial Sequence
  synthetic circulating small noncoding RNA (sncRNA) 5' transfer RNA (tRNA) half
cgttgcgttggccgggaatcgaacccgggtcaactgcttggaag

SEQ ID NO: 22649 - DNA, 10 bp, Artificial Sequence
  synthetic circulating small noncoding RNA (sncRNA) 5' transfer RNA (tRNA) half
gcccagcacg

SEQ ID NO: 22650 - DNA, 40 bp, Artificial Sequence
  synthetic circulating small noncoding RNA (sncRNA) 5' transfer RNA (tRNA) half
aatggttagcactctggactctgaatccagcgatccgagt

SEQ ID NO: 22651 - DNA, 17 bp, Artificial Sequence
  synthetic circulating small noncoding RNA (sncRNA) 5' transfer RNA (tRNA) half
agagtactaaccactat

SEQ ID NO: 22652 - DNA, 23 bp, Artificial Sequence
  synthetic circulating small noncoding RNA (sncRNA) 5' transfer RNA (tRNA) half
aatggtggagatgccggggatcg

SEQ ID NO: 22653 - DNA, 21 bp, Artificial Sequence
  synthetic circulating small noncoding RNA (sncRNA) 5' transfer RNA (tRNA) half
tcgaatccgagtcacggcagt

SEQ ID NO: 22654 - DNA, 17 bp, Artificial Sequence
  synthetic circulating small noncoding RNA (sncRNA) 5' transfer RNA (tRNA) half
ttgcgttggccgggaat

SEQ ID NO: 22655 - DNA, 26 bp, Artificial Sequence
  synthetic circulating small noncoding RNA (sncRNA) 5' transfer RNA (tRNA) half
aacaatctccccgtcggggaatcgaa

SEQ ID NO: 22656 - DNA, 24 bp, Artificial Sequence
  synthetic circulating small noncoding RNA (sncRNA) 5' transfer RNA (tRNA) half
gggccagtggcgcaatggataacg

SEQ ID NO: 22657 - DNA, 25 bp, Artificial Sequence
  synthetic circulating small noncoding RNA (sncRNA) 5' transfer RNA (tRNA) half
tgggttcgaatcccatcctcgtcgt

SEQ ID NO: 22658 - DNA, 11 bp, Artificial Sequence
  synthetic circulating small noncoding RNA (sncRNA) 5' transfer RNA (tRNA) half
gccgcagcaac

SEQ ID NO: 22659 - DNA, 15 bp, Artificial Sequence
  synthetic circulating small noncoding RNA (sncRNA) 5' transfer RNA (tRNA) half
acatggtctagcggt

SEQ ID NO: 22660 - DNA, 12 bp, Artificial Sequence
  synthetic circulating small noncoding RNA (sncRNA) 5' transfer RNA (tRNA) half
ggttcgatcccg

SEQ ID NO: 22661 - DNA, 17 bp, Artificial Sequence
  synthetic circulating small noncoding RNA (sncRNA) 5' transfer RNA (tRNA) half
agctggcccgtacgggg

SEQ ID NO: 22662 - DNA, 12 bp, Artificial Sequence
  synthetic circulating small noncoding RNA (sncRNA) 5' transfer RNA (tRNA) half
gtagtgtggccg

SEQ ID NO: 22663 - DNA, 12 bp, Artificial Sequence
  synthetic circulating small noncoding RNA (sncRNA) 5' transfer RNA (tRNA) half
gcacccggattt

SEQ ID NO: 22664 - DNA, 15 bp, Artificial Sequence
  synthetic circulating small noncoding RNA (sncRNA) 5' transfer RNA (tRNA) half
cccggtgtgggaaca

SEQ ID NO: 22665 - DNA, 31 bp, Artificial Sequence
  synthetic circulating small noncoding RNA (sncRNA) 5' transfer RNA (tRNA) half
tggcaggcgagaattctaccactgaaccacc

SEQ ID NO: 22666 - DNA, 26 bp, Artificial Sequence
  synthetic circulating small noncoding RNA (sncRNA) 5' transfer RNA (tRNA) half
gctgaccccgacgtgatttgaacacg

SEQ ID NO: 22667 - DNA, 14 bp, Artificial Sequence
  synthetic circulating small noncoding RNA (sncRNA) 5' transfer RNA (tRNA) half
ccgaggttgctgcg

SEQ ID NO: 22668 - DNA, 10 bp, Artificial Sequence
  synthetic circulating small noncoding RNA (sncRNA) 5' transfer RNA (tRNA) half
cgaatccacg

SEQ ID NO: 22669 - DNA, 16 bp, Artificial Sequence
  synthetic circulating small noncoding RNA (sncRNA) 5' transfer RNA (tRNA) half
actatacgatctcggc

SEQ ID NO: 22670 - DNA, 24 bp, Artificial Sequence
  synthetic circulating small noncoding RNA (sncRNA) 5' transfer RNA (tRNA) half
gcgtgttaggcgaatgtgataacc

SEQ ID NO: 22671 - DNA, 18 bp, Artificial Sequence
  synthetic circulating small noncoding RNA (sncRNA) 5' transfer RNA (tRNA) half
agtcccacgctctaccaa

SEQ ID NO: 22672 - DNA, 14 bp, Artificial Sequence
  synthetic circulating small noncoding RNA (sncRNA) 5' transfer RNA (tRNA) half
agcactctggactc

SEQ ID NO: 22673 - DNA, 37 bp, Artificial Sequence
  synthetic circulating small noncoding RNA (sncRNA) 5' transfer RNA (tRNA) half
ttccctgaccgggaatcgaacccgggccgcggcggtg

SEQ ID NO: 22674 - DNA, 31 bp, Artificial Sequence
  synthetic circulating small noncoding RNA (sncRNA) 5' transfer RNA (tRNA) half
gcgggaggcccgggttcgattcccggccaat

SEQ ID NO: 22675 - DNA, 19 bp, Artificial Sequence
  synthetic circulating small noncoding RNA (sncRNA) 5' transfer RNA (tRNA) half
cctccaggggagaccagaa

SEQ ID NO: 22676 - DNA, 13 bp, Artificial Sequence
  synthetic circulating small noncoding RNA (sncRNA) 5' transfer RNA (tRNA) half
tgggtgggctcga

SEQ ID NO: 22677 - DNA, 7 bp, Artificial Sequence
  synthetic circulating small noncoding RNA (sncRNA) 5' transfer RNA (tRNA) half
ggcccgt

SEQ ID NO: 22678 - DNA, 15 bp, Artificial Sequence
  synthetic circulating small noncoding RNA (sncRNA) 5' transfer RNA (tRNA) half
tctaaccaactgagc

SEQ ID NO: 22679 - DNA, 12 bp, Artificial Sequence
  synthetic circulating small noncoding RNA (sncRNA) 5' transfer RNA (tRNA) half
gagtgctaacca

SEQ ID NO: 22680 - DNA, 37 bp, Artificial Sequence
  synthetic circulating small noncoding RNA (sncRNA) 5' transfer RNA (tRNA) half
gccttgctgggattcgaacccaggatctcctgtttac

SEQ ID NO: 22681 - DNA, 14 bp, Artificial Sequence
  synthetic circulating small noncoding RNA (sncRNA) 5' transfer RNA (tRNA) half
cccggcacctccac

SEQ ID NO: 22682 - DNA, 38 bp, Artificial Sequence
  synthetic circulating small noncoding RNA (sncRNA) 5' transfer RNA (tRNA) half
tggttagtactctgcgttgtggccgcagcaacctcggt

SEQ ID NO: 22683 - DNA, 27 bp, Artificial Sequence
  synthetic circulating small noncoding RNA (sncRNA) 5' transfer RNA (tRNA) half
gcggtgagagcgccgaatcctaaccac

SEQ ID NO: 22684 - DNA, 23 bp, Artificial Sequence
  synthetic circulating small noncoding RNA (sncRNA) 5' transfer RNA (tRNA) half
gttcgaatcctgccgactacgtc

SEQ ID NO: 22685 - DNA, 11 bp, Artificial Sequence
  synthetic circulating small noncoding RNA (sncRNA) 5' transfer RNA (tRNA) half
cgtgctgggcc

SEQ ID NO: 22686 - DNA, 38 bp, Artificial Sequence
  synthetic circulating small noncoding RNA (sncRNA) 5' transfer RNA (tRNA) half
atctaaaggtccctggttcgatcccgggtttcggcagt

SEQ ID NO: 22687 - DNA, 19 bp, Artificial Sequence
  synthetic circulating small noncoding RNA (sncRNA) 5' transfer RNA (tRNA) half
caagaattctaccactgaa

SEQ ID NO: 22688 - DNA, 30 bp, Artificial Sequence
  synthetic circulating small noncoding RNA (sncRNA) 5' transfer RNA (tRNA) half
cttaggtcgctggttcgattccggctcgaa

SEQ ID NO: 22689 - DNA, 29 bp, Artificial Sequence
  synthetic circulating small noncoding RNA (sncRNA) 5' transfer RNA (tRNA) half
ggggaattagctcaaatggtagagcgctc

SEQ ID NO: 22690 - DNA, 18 bp, Artificial Sequence
  synthetic circulating small noncoding RNA (sncRNA) 5' transfer RNA (tRNA) half
cagcgccttagaccactc

SEQ ID NO: 22691 - DNA, 14 bp, Artificial Sequence
  synthetic circulating small noncoding RNA (sncRNA) 5' transfer RNA (tRNA) half
tccacctttcgggc

SEQ ID NO: 22692 - DNA, 14 bp, Artificial Sequence
  synthetic circulating small noncoding RNA (sncRNA) 5' transfer RNA (tRNA) half
cgaacccacgcgga

SEQ ID NO: 22693 - DNA, 11 bp, Artificial Sequence
  synthetic circulating small noncoding RNA (sncRNA) 5' transfer RNA (tRNA) half
ggccccgggtt

SEQ ID NO: 22694 - DNA, 8 bp, Artificial Sequence
  synthetic circulating small noncoding RNA (sncRNA) 5' transfer RNA (tRNA) half
aaccggcc

SEQ ID NO: 22695 - DNA, 18 bp, Artificial Sequence
  synthetic circulating small noncoding RNA (sncRNA) 5' transfer RNA (tRNA) half
ttctcgcttcgggtgcga

SEQ ID NO: 22696 - DNA, 19 bp, Artificial Sequence
  synthetic circulating small noncoding RNA (sncRNA) 5' transfer RNA (tRNA) half
gggccgcggcggtgaaagc

SEQ ID NO: 22697 - DNA, 32 bp, Artificial Sequence
  synthetic circulating small noncoding RNA (sncRNA) 5' transfer RNA (tRNA) half
ggcccgtacggggatcgaacccgcgaccttgg

SEQ ID NO: 22698 - DNA, 13 bp, Artificial Sequence
  synthetic circulating small noncoding RNA (sncRNA) 5' transfer RNA (tRNA) half
gctaagcgcccga

SEQ ID NO: 22699 - DNA, 24 bp, Artificial Sequence
  synthetic circulating small noncoding RNA (sncRNA) 5' transfer RNA (tRNA) half
agattgagggttcgagtcccttcg

SEQ ID NO: 22700 - DNA, 25 bp, Artificial Sequence
  synthetic circulating small noncoding RNA (sncRNA) 5' transfer RNA (tRNA) half
atgctctacccctgagctatacccc

SEQ ID NO: 22701 - DNA, 34 bp, Artificial Sequence
  synthetic circulating small noncoding RNA (sncRNA) 5' transfer RNA (tRNA) half
gtggcagcggtgggattcgaacccacgccatcga

SEQ ID NO: 22702 - DNA, 30 bp, Artificial Sequence
  synthetic circulating small noncoding RNA (sncRNA) 5' transfer RNA (tRNA) half
acagagtggttcaattccacctttcgggcg

SEQ ID NO: 22703 - DNA, 25 bp, Artificial Sequence
  synthetic circulating small noncoding RNA (sncRNA) 5' transfer RNA (tRNA) half
atgcagagtactaaccactatacga

SEQ ID NO: 22704 - DNA, 18 bp, Artificial Sequence
  synthetic circulating small noncoding RNA (sncRNA) 5' transfer RNA (tRNA) half
ccatgctctaccgactga

SEQ ID NO: 22705 - DNA, 31 bp, Artificial Sequence
  synthetic circulating small noncoding RNA (sncRNA) 5' transfer RNA (tRNA) half
agcgatccgagttcaaatctcggtgggacct

SEQ ID NO: 22706 - DNA, 12 bp, Artificial Sequence
  synthetic circulating small noncoding RNA (sncRNA) 5' transfer RNA (tRNA) half
aggggtcgcgag

SEQ ID NO: 22707 - DNA, 20 bp, Artificial Sequence
  synthetic circulating small noncoding RNA (sncRNA) 5' transfer RNA (tRNA) half
agacttaaaaccttgttccc

SEQ ID NO: 22708 - DNA, 8 bp, Artificial Sequence
  synthetic circulating small noncoding RNA (sncRNA) 5' transfer RNA (tRNA) half
cgagcccc

SEQ ID NO: 22709 - DNA, 15 bp, Artificial Sequence
  synthetic circulating small noncoding RNA (sncRNA) 5' transfer RNA (tRNA) half
agtcagacgcgttat

SEQ ID NO: 22710 - DNA, 18 bp, Artificial Sequence
  synthetic circulating small noncoding RNA (sncRNA) 5' transfer RNA (tRNA) half
gggtgcgagaggtcccgg

SEQ ID NO: 22711 - DNA, 38 bp, Artificial Sequence
  synthetic circulating small noncoding RNA (sncRNA) 5' transfer RNA (tRNA) half
cgcccaacgtggggctcgaacccacgaccctgggatta

SEQ ID NO: 22712 - DNA, 14 bp, Artificial Sequence
  synthetic circulating small noncoding RNA (sncRNA) 5' transfer RNA (tRNA) half
aggtcgctggttcg

SEQ ID NO: 22713 - DNA, 28 bp, Artificial Sequence
  synthetic circulating small noncoding RNA (sncRNA) 5' transfer RNA (tRNA) half
gtgagcactctggactctgaatccagcg

SEQ ID NO: 22714 - DNA, 21 bp, Artificial Sequence
  synthetic circulating small noncoding RNA (sncRNA) 5' transfer RNA (tRNA) half
agtagtcgtggccgagtggtt

SEQ ID NO: 22715 - DNA, 25 bp, Artificial Sequence
  synthetic circulating small noncoding RNA (sncRNA) 5' transfer RNA (tRNA) half
ggtgagagcgccaaatcctaaccac

SEQ ID NO: 22716 - DNA, 12 bp, Artificial Sequence
  synthetic circulating small noncoding RNA (sncRNA) 5' transfer RNA (tRNA) half
ggccatcgctgc

SEQ ID NO: 22717 - DNA, 32 bp, Artificial Sequence
  synthetic circulating small noncoding RNA (sncRNA) 5' transfer RNA (tRNA) half
tgcgctctaccactgagctacatccccagccg

SEQ ID NO: 22718 - DNA, 28 bp, Artificial Sequence
  synthetic circulating small noncoding RNA (sncRNA) 5' transfer RNA (tRNA) half
aatgctctaccactgagctatacccccg

SEQ ID NO: 22719 - DNA, 11 bp, Artificial Sequence
  synthetic circulating small noncoding RNA (sncRNA) 5' transfer RNA (tRNA) half
gggggattagc

SEQ ID NO: 22720 - DNA, 21 bp, Artificial Sequence
  synthetic circulating small noncoding RNA (sncRNA) 5' transfer RNA (tRNA) half
aggccagtgccttatccatta

SEQ ID NO: 22721 - DNA, 22 bp, Artificial Sequence
  synthetic circulating small noncoding RNA (sncRNA) 5' transfer RNA (tRNA) half
tccttcgagccggattcgaacc

SEQ ID NO: 22722 - DNA, 10 bp, Artificial Sequence
  synthetic circulating small noncoding RNA (sncRNA) 5' transfer RNA (tRNA) half
ccgggccttg

SEQ ID NO: 22723 - DNA, 22 bp, Artificial Sequence
  synthetic circulating small noncoding RNA (sncRNA) 5' transfer RNA (tRNA) half
aaaaaggccgagaccgtccctg

SEQ ID NO: 22724 - DNA, 32 bp, Artificial Sequence
  synthetic circulating small noncoding RNA (sncRNA) 5' transfer RNA (tRNA) half
ttccatagtgtagcggttatcacgtctgcttt

SEQ ID NO: 22725 - DNA, 44 bp, Artificial Sequence
  synthetic circulating small noncoding RNA (sncRNA) 5' transfer RNA (tRNA) half
gatcttaagtccaacgccttaaccactcggccatcctggtgcag

SEQ ID NO: 22726 - DNA, 10 bp, Artificial Sequence
  synthetic circulating small noncoding RNA (sncRNA) 5' transfer RNA (tRNA) half
gccgcccccc

SEQ ID NO: 22727 - DNA, 40 bp, Artificial Sequence
  synthetic circulating small noncoding RNA (sncRNA) 5' transfer RNA (tRNA) half
aggaagcctccctggtggtctagtggttaggattcggcgc

SEQ ID NO: 22728 - DNA, 21 bp, Artificial Sequence
  synthetic circulating small noncoding RNA (sncRNA) 5' transfer RNA (tRNA) half
tctcgcctgccacgcgggagg

SEQ ID NO: 22729 - DNA, 18 bp, Artificial Sequence
  synthetic circulating small noncoding RNA (sncRNA) 5' transfer RNA (tRNA) half
caactgagctaaccggcc

SEQ ID NO: 22730 - DNA, 25 bp, Artificial Sequence
  synthetic circulating small noncoding RNA (sncRNA) 5' transfer RNA (tRNA) half
ccggctagctcagtcggtagagcat

SEQ ID NO: 22731 - DNA, 12 bp, Artificial Sequence
  synthetic circulating small noncoding RNA (sncRNA) 5' transfer RNA (tRNA) half
ccgaatcctaac

SEQ ID NO: 22732 - DNA, 19 bp, Artificial Sequence
  synthetic circulating small noncoding RNA (sncRNA) 5' transfer RNA (tRNA) half
accgccgcggcccgggttc

SEQ ID NO: 22733 - DNA, 37 bp, Artificial Sequence
  synthetic circulating small noncoding RNA (sncRNA) 5' transfer RNA (tRNA) half
atgcatgaggtcctgggttcgatccccagcatctcca

SEQ ID NO: 22734 - DNA, 13 bp, Artificial Sequence
  synthetic circulating small noncoding RNA (sncRNA) 5' transfer RNA (tRNA) half
cggccatcacagc

SEQ ID NO: 22735 - DNA, 29 bp, Artificial Sequence
  synthetic circulating small noncoding RNA (sncRNA) 5' transfer RNA (tRNA) half
gtccgggatttgaacccgggacctctcgc

SEQ ID NO: 22736 - DNA, 9 bp, Artificial Sequence
  synthetic circulating small noncoding RNA (sncRNA) 5' transfer RNA (tRNA) half
acgcagcga

SEQ ID NO: 22737 - DNA, 21 bp, Artificial Sequence
  synthetic circulating small noncoding RNA (sncRNA) 5' transfer RNA (tRNA) half
tggttaggattcggcgctctc

SEQ ID NO: 22738 - DNA, 23 bp, Artificial Sequence
  synthetic circulating small noncoding RNA (sncRNA) 5' transfer RNA (tRNA) half
ccccgtcggggaatcgaaccccg

SEQ ID NO: 22739 - DNA, 22 bp, Artificial Sequence
  synthetic circulating small noncoding RNA (sncRNA) 5' transfer RNA (tRNA) half
gcagcgagcagggttcgaacct

SEQ ID NO: 22740 - DNA, 37 bp, Artificial Sequence
  synthetic circulating small noncoding RNA (sncRNA) 5' transfer RNA (tRNA) half
tccccgtcggggaatcgaaccccggtctcccgcgtga

SEQ ID NO: 22741 - DNA, 22 bp, Artificial Sequence
  synthetic circulating small noncoding RNA (sncRNA) 5' transfer RNA (tRNA) half
tcgaaaccgggcggaaacaaga

SEQ ID NO: 22742 - DNA, 8 bp, Artificial Sequence
  synthetic circulating small noncoding RNA (sncRNA) 5' transfer RNA (tRNA) half
cgcggccc

SEQ ID NO: 22743 - DNA, 19 bp, Artificial Sequence
  synthetic circulating small noncoding RNA (sncRNA) 5' transfer RNA (tRNA) half
ccgaaacccgggatcgaac

SEQ ID NO: 22744 - DNA, 11 bp, Artificial Sequence
  synthetic circulating small noncoding RNA (sncRNA) 5' transfer RNA (tRNA) half
agtctcatgct

SEQ ID NO: 22745 - DNA, 34 bp, Artificial Sequence
  synthetic circulating small noncoding RNA (sncRNA) 5' transfer RNA (tRNA) half
ggagcattggtggttcagtggtagaattctcgcc

SEQ ID NO: 22746 - DNA, 12 bp, Artificial Sequence
  synthetic circulating small noncoding RNA (sncRNA) 5' transfer RNA (tRNA) half
gttcgagtcccg

SEQ ID NO: 22747 - DNA, 14 bp, Artificial Sequence
  synthetic circulating small noncoding RNA (sncRNA) 5' transfer RNA (tRNA) half
tagttggttaaagc

SEQ ID NO: 22748 - DNA, 9 bp, Artificial Sequence
  synthetic circulating small noncoding RNA (sncRNA) 5' transfer RNA (tRNA) half
cggccaccg

SEQ ID NO: 22749 - DNA, 8 bp, Artificial Sequence
  synthetic circulating small noncoding RNA (sncRNA) 5' transfer RNA (tRNA) half
ctctggcg

SEQ ID NO: 22750 - DNA, 16 bp, Artificial Sequence
  synthetic circulating small noncoding RNA (sncRNA) 5' transfer RNA (tRNA) half
ttaagagtctcatgct

SEQ ID NO: 22751 - DNA, 24 bp, Artificial Sequence
  synthetic circulating small noncoding RNA (sncRNA) 5' transfer RNA (tRNA) half
agatggcagttgtcaggagtggga

SEQ ID NO: 22752 - DNA, 12 bp, Artificial Sequence
  synthetic circulating small noncoding RNA (sncRNA) 5' transfer RNA (tRNA) half
tcggccacctcg

SEQ ID NO: 22753 - DNA, 18 bp, Artificial Sequence
  synthetic circulating small noncoding RNA (sncRNA) 5' transfer RNA (tRNA) half
gaaccgaggttgctgcag

SEQ ID NO: 22754 - DNA, 20 bp, Artificial Sequence
  synthetic circulating small noncoding RNA (sncRNA) 5' transfer RNA (tRNA) half
tgcacgaggccccgggttca

SEQ ID NO: 22755 - DNA, 22 bp, Artificial Sequence
  synthetic circulating small noncoding RNA (sncRNA) 5' transfer RNA (tRNA) half
tgccacgcgggaggcccgggtt

SEQ ID NO: 22756 - DNA, 27 bp, Artificial Sequence
  synthetic circulating small noncoding RNA (sncRNA) 5' transfer RNA (tRNA) half
gcactctggactttgaatccagcgatc

SEQ ID NO: 22757 - DNA, 27 bp, Artificial Sequence
  synthetic circulating small noncoding RNA (sncRNA) 5' transfer RNA (tRNA) half
ttccgtagtgtagtggttatcacgctc

SEQ ID NO: 22758 - DNA, 45 bp, Artificial Sequence
  synthetic circulating small noncoding RNA (sncRNA) 5' transfer RNA (tRNA) half
ctccagtctcttcgggggcgtgggttcgaatcccaccgctgccat

SEQ ID NO: 22759 - DNA, 33 bp, Artificial Sequence
  synthetic circulating small noncoding RNA (sncRNA) 5' transfer RNA (tRNA) half
tggtgtaatggttagcactctggactctgaatc

SEQ ID NO: 22760 - DNA, 13 bp, Artificial Sequence
  synthetic circulating small noncoding RNA (sncRNA) 5' transfer RNA (tRNA) half
ggcacccggattt

SEQ ID NO: 22761 - DNA, 23 bp, Artificial Sequence
  synthetic circulating small noncoding RNA (sncRNA) 5' transfer RNA (tRNA) half
cgcagcggaagcgtgctgggccc

SEQ ID NO: 22762 - DNA, 39 bp, Artificial Sequence
  synthetic circulating small noncoding RNA (sncRNA) 5' transfer RNA (tRNA) half
ccgacgtgattcgaacacgcagccttctgatctggagtc

SEQ ID NO: 22763 - DNA, 13 bp, Artificial Sequence
  synthetic circulating small noncoding RNA (sncRNA) 5' transfer RNA (tRNA) half
gcgctaagaaggc

SEQ ID NO: 22764 - DNA, 22 bp, Artificial Sequence
  synthetic circulating small noncoding RNA (sncRNA) 5' transfer RNA (tRNA) half
agttgggagagcgttagactga

SEQ ID NO: 22765 - DNA, 14 bp, Artificial Sequence
  synthetic circulating small noncoding RNA (sncRNA) 5' transfer RNA (tRNA) half
ctggctggctcgtt

SEQ ID NO: 22766 - DNA, 19 bp, Artificial Sequence
  synthetic circulating small noncoding RNA (sncRNA) 5' transfer RNA (tRNA) half
tcggcaggattcgaacctg

SEQ ID NO: 22767 - DNA, 20 bp, Artificial Sequence
  synthetic circulating small noncoding RNA (sncRNA) 5' transfer RNA (tRNA) half
agtggtagaattctcgcctc

SEQ ID NO: 22768 - DNA, 13 bp, Artificial Sequence
  synthetic circulating small noncoding RNA (sncRNA) 5' transfer RNA (tRNA) half
acccgggccgcgg

SEQ ID NO: 22769 - DNA, 22 bp, Artificial Sequence
  synthetic circulating small noncoding RNA (sncRNA) 5' transfer RNA (tRNA) half
cggttatcacgtctgctttaca

SEQ ID NO: 22770 - DNA, 40 bp, Artificial Sequence
  synthetic circulating small noncoding RNA (sncRNA) 5' transfer RNA (tRNA) half
gtttccgtagtgtagtggttatcacgttcgcctcacacgc

SEQ ID NO: 22771 - DNA, 24 bp, Artificial Sequence
  synthetic circulating small noncoding RNA (sncRNA) 5' transfer RNA (tRNA) half
caaaagtagggctcgtccgggatt

SEQ ID NO: 22772 - DNA, 15 bp, Artificial Sequence
  synthetic circulating small noncoding RNA (sncRNA) 5' transfer RNA (tRNA) half
cctccttcgagccgg

SEQ ID NO: 22773 - DNA, 41 bp, Artificial Sequence
  synthetic circulating small noncoding RNA (sncRNA) 5' transfer RNA (tRNA) half
aatcgaacccgggccgcggcggtgagagcgccgaatcctaa

SEQ ID NO: 22774 - DNA, 27 bp, Artificial Sequence
  synthetic circulating small noncoding RNA (sncRNA) 5' transfer RNA (tRNA) half
cggggatcgaacccgcgaccttggcgt

SEQ ID NO: 22775 - DNA, 19 bp, Artificial Sequence
  synthetic circulating small noncoding RNA (sncRNA) 5' transfer RNA (tRNA) half
tggccgcagcaacctcggt

SEQ ID NO: 22776 - DNA, 35 bp, Artificial Sequence
  synthetic circulating small noncoding RNA (sncRNA) 5' transfer RNA (tRNA) half
caggagatcctgggttcaaatcccagcggggcctt

SEQ ID NO: 22777 - DNA, 20 bp, Artificial Sequence
  synthetic circulating small noncoding RNA (sncRNA) 5' transfer RNA (tRNA) half
taccattgaaccaccaatgc

SEQ ID NO: 22778 - DNA, 15 bp, Artificial Sequence
  synthetic circulating small noncoding RNA (sncRNA) 5' transfer RNA (tRNA) half
aatggataaggcatc

SEQ ID NO: 22779 - DNA, 25 bp, Artificial Sequence
  synthetic circulating small noncoding RNA (sncRNA) 5' transfer RNA (tRNA) half
gtgtagcggttatcacgtctgcttt

SEQ ID NO: 22780 - DNA, 22 bp, Artificial Sequence
  synthetic circulating small noncoding RNA (sncRNA) 5' transfer RNA (tRNA) half
ataggggttagtactctgcgtt

SEQ ID NO: 22781 - DNA, 11 bp, Artificial Sequence
  synthetic circulating small noncoding RNA (sncRNA) 5' transfer RNA (tRNA) half
cgggaggcccg

SEQ ID NO: 22782 - DNA, 33 bp, Artificial Sequence
  synthetic circulating small noncoding RNA (sncRNA) 5' transfer RNA (tRNA) half
attaagagtctcatgctctaccgactgagctag

SEQ ID NO: 22783 - DNA, 30 bp, Artificial Sequence
  synthetic circulating small noncoding RNA (sncRNA) 5' transfer RNA (tRNA) half
tgaactcggatcgctggattcagagtccag

SEQ ID NO: 22784 - DNA, 17 bp, Artificial Sequence
  synthetic circulating small noncoding RNA (sncRNA) 5' transfer RNA (tRNA) half
accggggacctcttgat

SEQ ID NO: 22785 - DNA, 18 bp, Artificial Sequence
  synthetic circulating small noncoding RNA (sncRNA) 5' transfer RNA (tRNA) half
gcgaatgtgataaccact

SEQ ID NO: 22786 - DNA, 9 bp, Artificial Sequence
  synthetic circulating small noncoding RNA (sncRNA) 5' transfer RNA (tRNA) half
gaggcccgg

SEQ ID NO: 22787 - DNA, 15 bp, Artificial Sequence
  synthetic circulating small noncoding RNA (sncRNA) 5' transfer RNA (tRNA) half
cccctagaccaacaa

SEQ ID NO: 22788 - DNA, 14 bp, Artificial Sequence
  synthetic circulating small noncoding RNA (sncRNA) 5' transfer RNA (tRNA) half
tgtgtgaggtcccg

SEQ ID NO: 22789 - DNA, 15 bp, Artificial Sequence
  synthetic circulating small noncoding RNA (sncRNA) 5' transfer RNA (tRNA) half
tagggggcacccgga

SEQ ID NO: 22790 - DNA, 14 bp, Artificial Sequence
  synthetic circulating small noncoding RNA (sncRNA) 5' transfer RNA (tRNA) half
gttcgatcccgggt

SEQ ID NO: 22791 - DNA, 15 bp, Artificial Sequence
  synthetic circulating small noncoding RNA (sncRNA) 5' transfer RNA (tRNA) half
aaacaatgcaggatg

SEQ ID NO: 22792 - DNA, 22 bp, Artificial Sequence
  synthetic circulating small noncoding RNA (sncRNA) 5' transfer RNA (tRNA) half
tcaaatcccggacgagcccagc

SEQ ID NO: 22793 - DNA, 21 bp, Artificial Sequence
  synthetic circulating small noncoding RNA (sncRNA) 5' transfer RNA (tRNA) half
gtccaatgcgctatccattgc

SEQ ID NO: 22794 - DNA, 25 bp, Artificial Sequence
  synthetic circulating small noncoding RNA (sncRNA) 5' transfer RNA (tRNA) half
ctttgggtgcgagaggtcccgggtt

SEQ ID NO: 22795 - DNA, 36 bp, Artificial Sequence
  synthetic circulating small noncoding RNA (sncRNA) 5' transfer RNA (tRNA) half
ggtcgagccagccaggagtcgaacctagaatcttct

SEQ ID NO: 22796 - DNA, 32 bp, Artificial Sequence
  synthetic circulating small noncoding RNA (sncRNA) 5' transfer RNA (tRNA) half
cgtgctgggcccataacccagaggtcgatgga

SEQ ID NO: 22797 - DNA, 18 bp, Artificial Sequence
  synthetic circulating small noncoding RNA (sncRNA) 5' transfer RNA (tRNA) half
cccaggtgggactcgaac

SEQ ID NO: 22798 - DNA, 15 bp, Artificial Sequence
  synthetic circulating small noncoding RNA (sncRNA) 5' transfer RNA (tRNA) half
cctgcgcggggagac

SEQ ID NO: 22799 - DNA, 35 bp, Artificial Sequence
  synthetic circulating small noncoding RNA (sncRNA) 5' transfer RNA (tRNA) half
cggatttgaaccagggacctcttgatctgcagtca

SEQ ID NO: 22800 - DNA, 13 bp, Artificial Sequence
  synthetic circulating small noncoding RNA (sncRNA) 5' transfer RNA (tRNA) half
ggaggcccgggtt

SEQ ID NO: 22801 - DNA, 7 bp, Artificial Sequence
  synthetic circulating small noncoding RNA (sncRNA) 5' transfer RNA (tRNA) half
ggccacg

SEQ ID NO: 22802 - DNA, 26 bp, Artificial Sequence
  synthetic circulating small noncoding RNA (sncRNA) 5' transfer RNA (tRNA) half
ggcatgggtggttcagtggtagaatt

SEQ ID NO: 22803 - DNA, 14 bp, Artificial Sequence
  synthetic circulating small noncoding RNA (sncRNA) 5' transfer RNA (tRNA) half
cgaacccaggaccc

SEQ ID NO: 22804 - DNA, 34 bp, Artificial Sequence
  synthetic circulating small noncoding RNA (sncRNA) 5' transfer RNA (tRNA) half
cctgtcacgcgggagaccggggttcgattccccg

SEQ ID NO: 22805 - DNA, 28 bp, Artificial Sequence
  synthetic circulating small noncoding RNA (sncRNA) 5' transfer RNA (tRNA) half
cgccaaggtcgcgggttcgatccccgta

SEQ ID NO: 22806 - DNA, 21 bp, Artificial Sequence
  synthetic circulating small noncoding RNA (sncRNA) 5' transfer RNA (tRNA) half
cgaatcccaccgctgccaacc

SEQ ID NO: 22807 - DNA, 41 bp, Artificial Sequence
  synthetic circulating small noncoding RNA (sncRNA) 5' transfer RNA (tRNA) half
aaaaggtaggcggtagccgtttggagatgccggggatcgaa

SEQ ID NO: 22808 - DNA, 29 bp, Artificial Sequence
  synthetic circulating small noncoding RNA (sncRNA) 5' transfer RNA (tRNA) half
ttgaccccgacgtgacttgaacacgcaac

SEQ ID NO: 22809 - DNA, 37 bp, Artificial Sequence
  synthetic circulating small noncoding RNA (sncRNA) 5' transfer RNA (tRNA) half
atgggtggttcagtggtagaattctcgcctgccacgc

SEQ ID NO: 22810 - DNA, 16 bp, Artificial Sequence
  synthetic circulating small noncoding RNA (sncRNA) 5' transfer RNA (tRNA) half
acagccgaacgcgcta

SEQ ID NO: 22811 - DNA, 27 bp, Artificial Sequence
  synthetic circulating small noncoding RNA (sncRNA) 5' transfer RNA (tRNA) half
agccagccaggagtcgaacctagaatc

SEQ ID NO: 22812 - DNA, 22 bp, Artificial Sequence
  synthetic circulating small noncoding RNA (sncRNA) 5' transfer RNA (tRNA) half
cgccaaatcctaaccactagac

SEQ ID NO: 22813 - DNA, 12 bp, Artificial Sequence
  synthetic circulating small noncoding RNA (sncRNA) 5' transfer RNA (tRNA) half
gcaacctcggtt

SEQ ID NO: 22814 - DNA, 35 bp, Artificial Sequence
  synthetic circulating small noncoding RNA (sncRNA) 5' transfer RNA (tRNA) half
tatgaggccccgggttcaatccccggcatctccaa

SEQ ID NO: 22815 - DNA, 25 bp, Artificial Sequence
  synthetic circulating small noncoding RNA (sncRNA) 5' transfer RNA (tRNA) half
gcccataacccagaggtcgatggat

SEQ ID NO: 22816 - DNA, 14 bp, Artificial Sequence
  synthetic circulating small noncoding RNA (sncRNA) 5' transfer RNA (tRNA) half
ggttcgaacccacg

SEQ ID NO: 22817 - DNA, 23 bp, Artificial Sequence
  synthetic circulating small noncoding RNA (sncRNA) 5' transfer RNA (tRNA) half
aaccgggcggaaacagcaacttt

SEQ ID NO: 22818 - DNA, 19 bp, Artificial Sequence
  synthetic circulating small noncoding RNA (sncRNA) 5' transfer RNA (tRNA) half
gacgtgattcgaacacgca

SEQ ID NO: 22819 - DNA, 20 bp, Artificial Sequence
  synthetic circulating small noncoding RNA (sncRNA) 5' transfer RNA (tRNA) half
attccacctttcgggcggga

SEQ ID NO: 22820 - DNA, 23 bp, Artificial Sequence
  synthetic circulating small noncoding RNA (sncRNA) 5' transfer RNA (tRNA) half
tgcgcggggagaccccaatggat

SEQ ID NO: 22821 - DNA, 24 bp, Artificial Sequence
  synthetic circulating small noncoding RNA (sncRNA) 5' transfer RNA (tRNA) half
cagggcccggatagctcagtcggt

SEQ ID NO: 22822 - DNA, 24 bp, Artificial Sequence
  synthetic circulating small noncoding RNA (sncRNA) 5' transfer RNA (tRNA) half
gtatgattctcggtttgggtccga

SEQ ID NO: 22823 - DNA, 30 bp, Artificial Sequence
  synthetic circulating small noncoding RNA (sncRNA) 5' transfer RNA (tRNA) half
gttgcgtgttcaaatcacgtcggggtcatc

SEQ ID NO: 22824 - DNA, 26 bp, Artificial Sequence
  synthetic circulating small noncoding RNA (sncRNA) 5' transfer RNA (tRNA) half
ggcgagcgtgatgaccactacactac

SEQ ID NO: 22825 - DNA, 29 bp, Artificial Sequence
  synthetic circulating small noncoding RNA (sncRNA) 5' transfer RNA (tRNA) half
gaggcccgggttcgattcccggccaatgc

SEQ ID NO: 22826 - DNA, 23 bp, Artificial Sequence
  synthetic circulating small noncoding RNA (sncRNA) 5' transfer RNA (tRNA) half
gactccgccgggactcgaacccg

SEQ ID NO: 22827 - DNA, 31 bp, Artificial Sequence
  synthetic circulating small noncoding RNA (sncRNA) 5' transfer RNA (tRNA) half
tgtttccgcccggtttcgaaccggggacctt

SEQ ID NO: 22828 - DNA, 21 bp, Artificial Sequence
  synthetic circulating small noncoding RNA (sncRNA) 5' transfer RNA (tRNA) half
cgctctcaccgccgcggcccg

SEQ ID NO: 22829 - DNA, 22 bp, Artificial Sequence
  synthetic circulating small noncoding RNA (sncRNA) 5' transfer RNA (tRNA) half
acccgcgtgggaggcgagaatt

SEQ ID NO: 22830 - DNA, 25 bp, Artificial Sequence
  synthetic circulating small noncoding RNA (sncRNA) 5' transfer RNA (tRNA) half
gggtgaaaaccaggaatcctaaccg

SEQ ID NO: 22831 - DNA, 14 bp, Artificial Sequence
  synthetic circulating small noncoding RNA (sncRNA) 5' transfer RNA (tRNA) half
aggtcgcagtctcc

SEQ ID NO: 22832 - DNA, 12 bp, Artificial Sequence
  synthetic circulating small noncoding RNA (sncRNA) 5' transfer RNA (tRNA) half
cggttagctcag

SEQ ID NO: 22833 - DNA, 21 bp, Artificial Sequence
  synthetic circulating small noncoding RNA (sncRNA) 5' transfer RNA (tRNA) half
cacccgaagcgagaatcatac

SEQ ID NO: 22834 - DNA, 11 bp, Artificial Sequence
  synthetic circulating small noncoding RNA (sncRNA) 5' transfer RNA (tRNA) half
ttcggcgctct

SEQ ID NO: 22835 - DNA, 37 bp, Artificial Sequence
  synthetic circulating small noncoding RNA (sncRNA) 5' transfer RNA (tRNA) half
tcagtggtctggggtgcaggcttcaaacctgtagctg

SEQ ID NO: 22836 - DNA, 36 bp, Artificial Sequence
  synthetic circulating small noncoding RNA (sncRNA) 5' transfer RNA (tRNA) half
gaggtcccaccgagatttgaactcggatcgctggat

SEQ ID NO: 22837 - DNA, 17 bp, Artificial Sequence
  synthetic circulating small noncoding RNA (sncRNA) 5' transfer RNA (tRNA) half
gattcccggcccatgca

SEQ ID NO: 22838 - DNA, 36 bp, Artificial Sequence
  synthetic circulating small noncoding RNA (sncRNA) 5' transfer RNA (tRNA) half
gtctgatgctctaccgactgagctatccaggctctt

SEQ ID NO: 22839 - DNA, 23 bp, Artificial Sequence
  synthetic circulating small noncoding RNA (sncRNA) 5' transfer RNA (tRNA) half
cccgacgtgacttgaacacgcaa

SEQ ID NO: 22840 - DNA, 17 bp, Artificial Sequence
  synthetic circulating small noncoding RNA (sncRNA) 5' transfer RNA (tRNA) half
cactataccaccaacgc

SEQ ID NO: 22841 - DNA, 11 bp, Artificial Sequence
  synthetic circulating small noncoding RNA (sncRNA) 5' transfer RNA (tRNA) half
cccgcgacctt

SEQ ID NO: 22842 - DNA, 28 bp, Artificial Sequence
  synthetic circulating small noncoding RNA (sncRNA) 5' transfer RNA (tRNA) half
caccacgctctaaccaactgagctaacc

SEQ ID NO: 22843 - DNA, 28 bp, Artificial Sequence
  synthetic circulating small noncoding RNA (sncRNA) 5' transfer RNA (tRNA) half
tctgaaggtcctgagttcgaacctcaga

SEQ ID NO: 22844 - DNA, 15 bp, Artificial Sequence
  synthetic circulating small noncoding RNA (sncRNA) 5' transfer RNA (tRNA) half
aatgcgctatccatt

SEQ ID NO: 22845 - DNA, 6 bp, Artificial Sequence
  synthetic circulating small noncoding RNA (sncRNA) 5' transfer RNA (tRNA) half
ccgtgg

SEQ ID NO: 22846 - DNA, 24 bp, Artificial Sequence
  synthetic circulating small noncoding RNA (sncRNA) 5' transfer RNA (tRNA) half
tctaggggtatgattctcgcttag

SEQ ID NO: 22847 - DNA, 11 bp, Artificial Sequence
  synthetic circulating small noncoding RNA (sncRNA) 5' transfer RNA (tRNA) half
cgcgggttcga

SEQ ID NO: 22848 - DNA, 15 bp, Artificial Sequence
  synthetic circulating small noncoding RNA (sncRNA) 5' transfer RNA (tRNA) half
ctctaccatttgagc

SEQ ID NO: 22849 - DNA, 12 bp, Artificial Sequence
  synthetic circulating small noncoding RNA (sncRNA) 5' transfer RNA (tRNA) half
gcacgcttccgc

SEQ ID NO: 22850 - DNA, 13 bp, Artificial Sequence
  synthetic circulating small noncoding RNA (sncRNA) 5' transfer RNA (tRNA) half
gctggattcaaag

SEQ ID NO: 22851 - DNA, 24 bp, Artificial Sequence
  synthetic circulating small noncoding RNA (sncRNA) 5' transfer RNA (tRNA) half
aggtccccggttcgaaaccgggcg

SEQ ID NO: 22852 - DNA, 13 bp, Artificial Sequence
  synthetic circulating small noncoding RNA (sncRNA) 5' transfer RNA (tRNA) half
ggtctccccgcgc

SEQ ID NO: 22853 - DNA, 14 bp, Artificial Sequence
  synthetic circulating small noncoding RNA (sncRNA) 5' transfer RNA (tRNA) half
tacactacagaaac

SEQ ID NO: 22854 - DNA, 17 bp, Artificial Sequence
  synthetic circulating small noncoding RNA (sncRNA) 5' transfer RNA (tRNA) half
gcagcgagcagggttcg

SEQ ID NO: 22855 - DNA, 14 bp, Artificial Sequence
  synthetic circulating small noncoding RNA (sncRNA) 5' transfer RNA (tRNA) half
cgaagagactggag

SEQ ID NO: 22856 - DNA, 36 bp, Artificial Sequence
  synthetic circulating small noncoding RNA (sncRNA) 5' transfer RNA (tRNA) half
agccagccaggagtcgaacctagaatcttctgatcc

SEQ ID NO: 22857 - DNA, 30 bp, Artificial Sequence
  synthetic circulating small noncoding RNA (sncRNA) 5' transfer RNA (tRNA) half
cagcgatccgagttcaaatctcggtggaac

SEQ ID NO: 22858 - DNA, 29 bp, Artificial Sequence
  synthetic circulating small noncoding RNA (sncRNA) 5' transfer RNA (tRNA) half
caccacgctctaaccaactgagctaaccg

SEQ ID NO: 22859 - DNA, 41 bp, Artificial Sequence
  synthetic circulating small noncoding RNA (sncRNA) 5' transfer RNA (tRNA) half
gaacccgggccgcggcggtgagagcgccgaatcctaaccac

SEQ ID NO: 22860 - DNA, 24 bp, Artificial Sequence
  synthetic circulating small noncoding RNA (sncRNA) 5' transfer RNA (tRNA) half
agtcgaacctacaatcttctgatc

SEQ ID NO: 22861 - DNA, 19 bp, Artificial Sequence
  synthetic circulating small noncoding RNA (sncRNA) 5' transfer RNA (tRNA) half
cggtctaaggcgctgcgtt

SEQ ID NO: 22862 - DNA, 21 bp, Artificial Sequence
  synthetic circulating small noncoding RNA (sncRNA) 5' transfer RNA (tRNA) half
gtggcaggcgagaattctacc

SEQ ID NO: 22863 - DNA, 11 bp, Artificial Sequence
  synthetic circulating small noncoding RNA (sncRNA) 5' transfer RNA (tRNA) half
cgcgaaaggtc

SEQ ID NO: 22864 - DNA, 13 bp, Artificial Sequence
  synthetic circulating small noncoding RNA (sncRNA) 5' transfer RNA (tRNA) half
tcggagaccagaa

SEQ ID NO: 22865 - DNA, 19 bp, Artificial Sequence
  synthetic circulating small noncoding RNA (sncRNA) 5' transfer RNA (tRNA) half
attcccgggcggcgcatgt

SEQ ID NO: 22866 - DNA, 28 bp, Artificial Sequence
  synthetic circulating small noncoding RNA (sncRNA) 5' transfer RNA (tRNA) half
gccgaatcctagccactagaccaccagg

SEQ ID NO: 22867 - DNA, 35 bp, Artificial Sequence
  synthetic circulating small noncoding RNA (sncRNA) 5' transfer RNA (tRNA) half
gtgcccggctagctcagtcggtagagcatgagact

SEQ ID NO: 22868 - DNA, 24 bp, Artificial Sequence
  synthetic circulating small noncoding RNA (sncRNA) 5' transfer RNA (tRNA) half
attagggtggcagagccaggaaat

SEQ ID NO: 22869 - DNA, 22 bp, Artificial Sequence
  synthetic circulating small noncoding RNA (sncRNA) 5' transfer RNA (tRNA) half
cccgggacctctcgcacccaaa

SEQ ID NO: 22870 - DNA, 12 bp, Artificial Sequence
  synthetic circulating small noncoding RNA (sncRNA) 5' transfer RNA (tRNA) half
agtagcgcccga

SEQ ID NO: 22871 - DNA, 30 bp, Artificial Sequence
  synthetic circulating small noncoding RNA (sncRNA) 5' transfer RNA (tRNA) half
ggttccatagggtagtggttatcacatctg

SEQ ID NO: 22872 - DNA, 17 bp, Artificial Sequence
  synthetic circulating small noncoding RNA (sncRNA) 5' transfer RNA (tRNA) half
agaccagtgctctaacc

SEQ ID NO: 22873 - DNA, 26 bp, Artificial Sequence
  synthetic circulating small noncoding RNA (sncRNA) 5' transfer RNA (tRNA) half
cgctctaccatttgagctaatccccc

SEQ ID NO: 22874 - DNA, 13 bp, Artificial Sequence
  synthetic circulating small noncoding RNA (sncRNA) 5' transfer RNA (tRNA) half
ttggccgggaatc

SEQ ID NO: 22875 - DNA, 35 bp, Artificial Sequence
  synthetic circulating small noncoding RNA (sncRNA) 5' transfer RNA (tRNA) half
gaaggcagctatgctcaccactataccaccaacgc

SEQ ID NO: 22876 - DNA, 15 bp, Artificial Sequence
  synthetic circulating small noncoding RNA (sncRNA) 5' transfer RNA (tRNA) half
cgcaatggataacgc

SEQ ID NO: 22877 - DNA, 35 bp, Artificial Sequence
  synthetic circulating small noncoding RNA (sncRNA) 5' transfer RNA (tRNA) half
gcctggatagctcagtcggtagagcatcagacttt

SEQ ID NO: 22878 - DNA, 23 bp, Artificial Sequence
  synthetic circulating small noncoding RNA (sncRNA) 5' transfer RNA (tRNA) half
gccttagaccgctcggccacgct

SEQ ID NO: 22879 - DNA, 20 bp, Artificial Sequence
  synthetic circulating small noncoding RNA (sncRNA) 5' transfer RNA (tRNA) half
agcgtgctgggcccataacc

SEQ ID NO: 22880 - DNA, 30 bp, Artificial Sequence
  synthetic circulating small noncoding RNA (sncRNA) 5' transfer RNA (tRNA) half
gtctggcgccttagaccactcggccatcct

SEQ ID NO: 22881 - DNA, 33 bp, Artificial Sequence
  synthetic circulating small noncoding RNA (sncRNA) 5' transfer RNA (tRNA) half
cccggtctcccgcgtgacaggcggggatactaa

SEQ ID NO: 22882 - DNA, 29 bp, Artificial Sequence
  synthetic circulating small noncoding RNA (sncRNA) 5' transfer RNA (tRNA) half
gagcgtgataaccgctacactacaaaaac

SEQ ID NO: 22883 - DNA, 10 bp, Artificial Sequence
  synthetic circulating small noncoding RNA (sncRNA) 5' transfer RNA (tRNA) half
tcgtccggga

SEQ ID NO: 22884 - DNA, 13 bp, Artificial Sequence
  synthetic circulating small noncoding RNA (sncRNA) 5' transfer RNA (tRNA) half
cttggaaggcagc

SEQ ID NO: 22885 - DNA, 24 bp, Artificial Sequence
  synthetic circulating small noncoding RNA (sncRNA) 5' transfer RNA (tRNA) half
gaatcgaaccccggtctcccgcgt

SEQ ID NO: 22886 - DNA, 30 bp, Artificial Sequence
  synthetic circulating small noncoding RNA (sncRNA) 5' transfer RNA (tRNA) half
acgaggccctgggttcgatccccagcacct

SEQ ID NO: 22887 - DNA, 23 bp, Artificial Sequence
  synthetic circulating small noncoding RNA (sncRNA) 5' transfer RNA (tRNA) half
ggggacctcttgatctgcagtca

SEQ ID NO: 22888 - DNA, 9 bp, Artificial Sequence
  synthetic circulating small noncoding RNA (sncRNA) 5' transfer RNA (tRNA) half
acccgggcc

SEQ ID NO: 22889 - DNA, 38 bp, Artificial Sequence
  synthetic circulating small noncoding RNA (sncRNA) 5' transfer RNA (tRNA) half
ctcggatcgctggattcagagtccagagtgctagccat

SEQ ID NO: 22890 - DNA, 16 bp, Artificial Sequence
  synthetic circulating small noncoding RNA (sncRNA) 5' transfer RNA (tRNA) half
aggattcggcgctctc

SEQ ID NO: 22891 - DNA, 24 bp, Artificial Sequence
  synthetic circulating small noncoding RNA (sncRNA) 5' transfer RNA (tRNA) half
aaaactgggctcgtccgggatttg

SEQ ID NO: 22892 - DNA, 26 bp, Artificial Sequence
  synthetic circulating small noncoding RNA (sncRNA) 5' transfer RNA (tRNA) half
gtatgattctcgctttgggtgcgaga

SEQ ID NO: 22893 - DNA, 30 bp, Artificial Sequence
  synthetic circulating small noncoding RNA (sncRNA) 5' transfer RNA (tRNA) half
ttaggattcctggttttcacccaggcggcc

SEQ ID NO: 22894 - DNA, 25 bp, Artificial Sequence
  synthetic circulating small noncoding RNA (sncRNA) 5' transfer RNA (tRNA) half
gcatcgatcccactacctctcgcat

SEQ ID NO: 22895 - DNA, 36 bp, Artificial Sequence
  synthetic circulating small noncoding RNA (sncRNA) 5' transfer RNA (tRNA) half
cacgaggccctgggttcgatccccagcacctccatt

SEQ ID NO: 22896 - DNA, 32 bp, Artificial Sequence
  synthetic circulating small noncoding RNA (sncRNA) 5' transfer RNA (tRNA) half
gcccagcacgcttccgctgcgccactctgcta

SEQ ID NO: 22897 - DNA, 21 bp, Artificial Sequence
  synthetic circulating small noncoding RNA (sncRNA) 5' transfer RNA (tRNA) half
tcccacttctgacaaatactt

SEQ ID NO: 22898 - DNA, 12 bp, Artificial Sequence
  synthetic circulating small noncoding RNA (sncRNA) 5' transfer RNA (tRNA) half
aggcggcccggg

SEQ ID NO: 22899 - DNA, 40 bp, Artificial Sequence
  synthetic circulating small noncoding RNA (sncRNA) 5' transfer RNA (tRNA) half
gttcccacaccgggagtcgaacccgggccgcctgggtgaa

SEQ ID NO: 22900 - DNA, 22 bp, Artificial Sequence
  synthetic circulating small noncoding RNA (sncRNA) 5' transfer RNA (tRNA) half
cttagaccgctcggccacacta

SEQ ID NO: 22901 - DNA, 10 bp, Artificial Sequence
  synthetic circulating small noncoding RNA (sncRNA) 5' transfer RNA (tRNA) half
agcgagaatc

SEQ ID NO: 22902 - DNA, 27 bp, Artificial Sequence
  synthetic circulating small noncoding RNA (sncRNA) 5' transfer RNA (tRNA) half
agtggttcaattccacctttcgggcgg

SEQ ID NO: 22903 - DNA, 34 bp, Artificial Sequence
  synthetic circulating small noncoding RNA (sncRNA) 5' transfer RNA (tRNA) half
gaggttgtgagttcgatcctcacctggagcactt

SEQ ID NO: 22904 - DNA, 28 bp, Artificial Sequence
  synthetic circulating small noncoding RNA (sncRNA) 5' transfer RNA (tRNA) half
gcgactctggtgggactcgaacccacaa

SEQ ID NO: 22905 - DNA, 15 bp, Artificial Sequence
  synthetic circulating small noncoding RNA (sncRNA) 5' transfer RNA (tRNA) half
taggattcctggttt

SEQ ID NO: 22906 - DNA, 15 bp, Artificial Sequence
  synthetic circulating small noncoding RNA (sncRNA) 5' transfer RNA (tRNA) half
ctctggactctgaat

SEQ ID NO: 22907 - DNA, 23 bp, Artificial Sequence
  synthetic circulating small noncoding RNA (sncRNA) 5' transfer RNA (tRNA) half
tagtgtggccgagcggtctaagg

SEQ ID NO: 22908 - DNA, 17 bp, Artificial Sequence
  synthetic circulating small noncoding RNA (sncRNA) 5' transfer RNA (tRNA) half
caggtgaggctcgaact

SEQ ID NO: 22909 - DNA, 22 bp, Artificial Sequence
  synthetic circulating small noncoding RNA (sncRNA) 5' transfer RNA (tRNA) half
cccggatagctcagtcggtaga

SEQ ID NO: 22910 - DNA, 29 bp, Artificial Sequence
  synthetic circulating small noncoding RNA (sncRNA) 5' transfer RNA (tRNA) half
tggttagcactctggactttgaatccagc

SEQ ID NO: 22911 - DNA, 19 bp, Artificial Sequence
  synthetic circulating small noncoding RNA (sncRNA) 5' transfer RNA (tRNA) half
tcccggacgagcccaagca

SEQ ID NO: 22912 - DNA, 11 bp, Artificial Sequence
  synthetic circulating small noncoding RNA (sncRNA) 5' transfer RNA (tRNA) half
gttcgactcct

SEQ ID NO: 22913 - DNA, 22 bp, Artificial Sequence
  synthetic circulating small noncoding RNA (sncRNA) 5' transfer RNA (tRNA) half
aatcgaacccgggtcaactgct

SEQ ID NO: 22914 - DNA, 9 bp, Artificial Sequence
  synthetic circulating small noncoding RNA (sncRNA) 5' transfer RNA (tRNA) half
gcctccatt

SEQ ID NO: 22915 - DNA, 37 bp, Artificial Sequence
  synthetic circulating small noncoding RNA (sncRNA) 5' transfer RNA (tRNA) half
cgaccacgaagggactcgaacccccaatcttctgatc

SEQ ID NO: 22916 - DNA, 17 bp, Artificial Sequence
  synthetic circulating small noncoding RNA (sncRNA) 5' transfer RNA (tRNA) half
aaaggtcccaccgagat

SEQ ID NO: 22917 - DNA, 19 bp, Artificial Sequence
  synthetic circulating small noncoding RNA (sncRNA) 5' transfer RNA (tRNA) half
ccgagccagccaggagtcg

SEQ ID NO: 22918 - DNA, 17 bp, Artificial Sequence
  synthetic circulating small noncoding RNA (sncRNA) 5' transfer RNA (tRNA) half
cggttagcgcgcggtac

SEQ ID NO: 22919 - DNA, 33 bp, Artificial Sequence
  synthetic circulating small noncoding RNA (sncRNA) 5' transfer RNA (tRNA) half
gtccctggtggtctagtggctaggattcggcgc

SEQ ID NO: 22920 - DNA, 40 bp, Artificial Sequence
  synthetic circulating small noncoding RNA (sncRNA) 5' transfer RNA (tRNA) half
tcggcaggattcgaacctgcgcggggaaaccccaatggat

SEQ ID NO: 22921 - DNA, 17 bp, Artificial Sequence
  synthetic circulating small noncoding RNA (sncRNA) 5' transfer RNA (tRNA) half
tcatgctctaccgactg

SEQ ID NO: 22922 - DNA, 34 bp, Artificial Sequence
  synthetic circulating small noncoding RNA (sncRNA) 5' transfer RNA (tRNA) half
agccagggattgtgggttcgagtcccatctgggg

SEQ ID NO: 22923 - DNA, 13 bp, Artificial Sequence
  synthetic circulating small noncoding RNA (sncRNA) 5' transfer RNA (tRNA) half
tttccgtagtgta

SEQ ID NO: 22924 - DNA, 8 bp, Artificial Sequence
  synthetic circulating small noncoding RNA (sncRNA) 5' transfer RNA (tRNA) half
attcggcg

SEQ ID NO: 22925 - DNA, 20 bp, Artificial Sequence
  synthetic circulating small noncoding RNA (sncRNA) 5' transfer RNA (tRNA) half
aaaacaaagcctccgatagc

SEQ ID NO: 22926 - DNA, 31 bp, Artificial Sequence
  synthetic circulating small noncoding RNA (sncRNA) 5' transfer RNA (tRNA) half
gaacccgggccgcggcggtgagagcgccgaa

SEQ ID NO: 22927 - DNA, 12 bp, Artificial Sequence
  synthetic circulating small noncoding RNA (sncRNA) 5' transfer RNA (tRNA) half
gaacccacgcct

SEQ ID NO: 22928 - DNA, 20 bp, Artificial Sequence
  synthetic circulating small noncoding RNA (sncRNA) 5' transfer RNA (tRNA) half
tcaagtccctgttcgggcgc

SEQ ID NO: 22929 - DNA, 12 bp, Artificial Sequence
  synthetic circulating small noncoding RNA (sncRNA) 5' transfer RNA (tRNA) half
gactcgaacccg

SEQ ID NO: 22930 - DNA, 11 bp, Artificial Sequence
  synthetic circulating small noncoding RNA (sncRNA) 5' transfer RNA (tRNA) half
ctcggccacga

SEQ ID NO: 22931 - DNA, 7 bp, Artificial Sequence
  synthetic circulating small noncoding RNA (sncRNA) 5' transfer RNA (tRNA) half
gcgagaa

SEQ ID NO: 22932 - DNA, 32 bp, Artificial Sequence
  synthetic circulating small noncoding RNA (sncRNA) 5' transfer RNA (tRNA) half
ggattcagagtccagagtgctaaccattacac

SEQ ID NO: 22933 - DNA, 34 bp, Artificial Sequence
  synthetic circulating small noncoding RNA (sncRNA) 5' transfer RNA (tRNA) half
gtggctcgttggtctaggggtatgattctcgctt

SEQ ID NO: 22934 - DNA, 25 bp, Artificial Sequence
  synthetic circulating small noncoding RNA (sncRNA) 5' transfer RNA (tRNA) half
tgggattcgaacccatgcgtgcaga

SEQ ID NO: 22935 - DNA, 36 bp, Artificial Sequence
  synthetic circulating small noncoding RNA (sncRNA) 5' transfer RNA (tRNA) half
caagaggtccctggttcaaatccaggtgccccctac

SEQ ID NO: 22936 - DNA, 22 bp, Artificial Sequence
  synthetic circulating small noncoding RNA (sncRNA) 5' transfer RNA (tRNA) half
tcacacgcgagaggtccccggt

SEQ ID NO: 22937 - DNA, 14 bp, Artificial Sequence
  synthetic circulating small noncoding RNA (sncRNA) 5' transfer RNA (tRNA) half
acatccccagccgc

SEQ ID NO: 22938 - DNA, 29 bp, Artificial Sequence
  synthetic circulating small noncoding RNA (sncRNA) 5' transfer RNA (tRNA) half
ggagtggggttcgaacccacgcagacata

SEQ ID NO: 22939 - DNA, 19 bp, Artificial Sequence
  synthetic circulating small noncoding RNA (sncRNA) 5' transfer RNA (tRNA) half
taatggataaggcattggc

SEQ ID NO: 22940 - DNA, 37 bp, Artificial Sequence
  synthetic circulating small noncoding RNA (sncRNA) 5' transfer RNA (tRNA) half
cgcgggaggcccgggttcgattcccggccaatgcagg

SEQ ID NO: 22941 - DNA, 29 bp, Artificial Sequence
  synthetic circulating small noncoding RNA (sncRNA) 5' transfer RNA (tRNA) half
ctgaccgggaatcgaacccgggccgcggc

SEQ ID NO: 22942 - DNA, 10 bp, Artificial Sequence
  synthetic circulating small noncoding RNA (sncRNA) 5' transfer RNA (tRNA) half
cgcgggttcg

SEQ ID NO: 22943 - DNA, 19 bp, Artificial Sequence
  synthetic circulating small noncoding RNA (sncRNA) 5' transfer RNA (tRNA) half
cccgcgtggcaggcgagaa

SEQ ID NO: 22944 - DNA, 28 bp, Artificial Sequence
  synthetic circulating small noncoding RNA (sncRNA) 5' transfer RNA (tRNA) half
ggattcagagtccagagtgctaaccatt

SEQ ID NO: 22945 - DNA, 10 bp, Artificial Sequence
  synthetic circulating small noncoding RNA (sncRNA) 5' transfer RNA (tRNA) half
tggccgggaa

SEQ ID NO: 22946 - DNA, 19 bp, Artificial Sequence
  synthetic circulating small noncoding RNA (sncRNA) 5' transfer RNA (tRNA) half
tcgtggccgagtggttaag

SEQ ID NO: 22947 - DNA, 29 bp, Artificial Sequence
  synthetic circulating small noncoding RNA (sncRNA) 5' transfer RNA (tRNA) half
aagtaaccacgaagggattcgaaccctca

SEQ ID NO: 22948 - DNA, 10 bp, Artificial Sequence
  synthetic circulating small noncoding RNA (sncRNA) 5' transfer RNA (tRNA) half
ggtcgcgggt

SEQ ID NO: 22949 - DNA, 14 bp, Artificial Sequence
  synthetic circulating small noncoding RNA (sncRNA) 5' transfer RNA (tRNA) half
tatcacgctcgcct

SEQ ID NO: 22950 - DNA, 26 bp, Artificial Sequence
  synthetic circulating small noncoding RNA (sncRNA) 5' transfer RNA (tRNA) half
tggtctagtggttaggattcggcgct

SEQ ID NO: 22951 - DNA, 12 bp, Artificial Sequence
  synthetic circulating small noncoding RNA (sncRNA) 5' transfer RNA (tRNA) half
tcagacgcgtta

SEQ ID NO: 22952 - DNA, 16 bp, Artificial Sequence
  synthetic circulating small noncoding RNA (sncRNA) 5' transfer RNA (tRNA) half
ctcgcgacccctggtt

SEQ ID NO: 22953 - DNA, 32 bp, Artificial Sequence
  synthetic circulating small noncoding RNA (sncRNA) 5' transfer RNA (tRNA) half
gccaggagtcgaacctagaatcttctgatccg

SEQ ID NO: 22954 - DNA, 14 bp, Artificial Sequence
  synthetic circulating small noncoding RNA (sncRNA) 5' transfer RNA (tRNA) half
aatctcggtgggac

SEQ ID NO: 22955 - DNA, 27 bp, Artificial Sequence
  synthetic circulating small noncoding RNA (sncRNA) 5' transfer RNA (tRNA) half
ttcccacaccgggagtcgaacccgggc

SEQ ID NO: 22956 - DNA, 14 bp, Artificial Sequence
  synthetic circulating small noncoding RNA (sncRNA) 5' transfer RNA (tRNA) half
aggcaccgctggga

SEQ ID NO: 22957 - DNA, 28 bp, Artificial Sequence
  synthetic circulating small noncoding RNA (sncRNA) 5' transfer RNA (tRNA) half
gaccccgacgtgatttgaacacgcaacc

SEQ ID NO: 22958 - DNA, 8 bp, Artificial Sequence
  synthetic circulating small noncoding RNA (sncRNA) 5' transfer RNA (tRNA) half
tcgagccc

SEQ ID NO: 22959 - DNA, 6 bp, Artificial Sequence
  synthetic circulating small noncoding RNA (sncRNA) 5' transfer RNA (tRNA) half
cggcgc

SEQ ID NO: 22960 - DNA, 20 bp, Artificial Sequence
  synthetic circulating small noncoding RNA (sncRNA) 5' transfer RNA (tRNA) half
aggcgagcgtgatgaccact

SEQ ID NO: 22961 - DNA, 17 bp, Artificial Sequence
  synthetic circulating small noncoding RNA (sncRNA) 5' transfer RNA (tRNA) half
ttctgggttcgagtccc

SEQ ID NO: 22962 - DNA, 22 bp, Artificial Sequence
  synthetic circulating small noncoding RNA (sncRNA) 5' transfer RNA (tRNA) half
aaagcgagaatcatacccctag

SEQ ID NO: 22963 - DNA, 20 bp, Artificial Sequence
  synthetic circulating small noncoding RNA (sncRNA) 5' transfer RNA (tRNA) half
cactcggccatcgctgctac

SEQ ID NO: 22964 - DNA, 18 bp, Artificial Sequence
  synthetic circulating small noncoding RNA (sncRNA) 5' transfer RNA (tRNA) half
gaccgcgtggcctaatgg

SEQ ID NO: 22965 - DNA, 37 bp, Artificial Sequence
  synthetic circulating small noncoding RNA (sncRNA) 5' transfer RNA (tRNA) half
agtcccatgctctaccgactgagctagccgggcagct

SEQ ID NO: 22966 - DNA, 21 bp, Artificial Sequence
  synthetic circulating small noncoding RNA (sncRNA) 5' transfer RNA (tRNA) half
cgagcggtctaaggcgctgcg

SEQ ID NO: 22967 - DNA, 9 bp, Artificial Sequence
  synthetic circulating small noncoding RNA (sncRNA) 5' transfer RNA (tRNA) half
tccggagct

SEQ ID NO: 22968 - DNA, 37 bp, Artificial Sequence
  synthetic circulating small noncoding RNA (sncRNA) 5' transfer RNA (tRNA) half
gaccacgaagggactcgaaccctcaatcttctgatcc

SEQ ID NO: 22969 - DNA, 23 bp, Artificial Sequence
  synthetic circulating small noncoding RNA (sncRNA) 5' transfer RNA (tRNA) half
ggttcgaatcctgccgactacgg

SEQ ID NO: 22970 - DNA, 35 bp, Artificial Sequence
  synthetic circulating small noncoding RNA (sncRNA) 5' transfer RNA (tRNA) half
ctgaaggtcctgagttcgaacctcagagggggcag

SEQ ID NO: 22971 - DNA, 27 bp, Artificial Sequence
  synthetic circulating small noncoding RNA (sncRNA) 5' transfer RNA (tRNA) half
ggtgtaatggttagcactctggactct

SEQ ID NO: 22972 - DNA, 19 bp, Artificial Sequence
  synthetic circulating small noncoding RNA (sncRNA) 5' transfer RNA (tRNA) half
ccgtgactcggattcgaac

SEQ ID NO: 22973 - DNA, 16 bp, Artificial Sequence
  synthetic circulating small noncoding RNA (sncRNA) 5' transfer RNA (tRNA) half
cgtacggggatcgaac

SEQ ID NO: 22974 - DNA, 22 bp, Artificial Sequence
  synthetic circulating small noncoding RNA (sncRNA) 5' transfer RNA (tRNA) half
gtaaccacgaagggattcgaac

SEQ ID NO: 22975 - DNA, 8 bp, Artificial Sequence
  synthetic circulating small noncoding RNA (sncRNA) 5' transfer RNA (tRNA) half
tgggcgag

SEQ ID NO: 22976 - DNA, 30 bp, Artificial Sequence
  synthetic circulating small noncoding RNA (sncRNA) 5' transfer RNA (tRNA) half
gagaggtcccgggttcaaatcccggacgag

SEQ ID NO: 22977 - DNA, 18 bp, Artificial Sequence
  synthetic circulating small noncoding RNA (sncRNA) 5' transfer RNA (tRNA) half
tcgacgaggatgggattc

SEQ ID NO: 22978 - DNA, 30 bp, Artificial Sequence
  synthetic circulating small noncoding RNA (sncRNA) 5' transfer RNA (tRNA) half
aggatggccgagtggtctaaggcgccagac

SEQ ID NO: 22979 - DNA, 16 bp, Artificial Sequence
  synthetic circulating small noncoding RNA (sncRNA) 5' transfer RNA (tRNA) half
cgaaccagcgacctaa

SEQ ID NO: 22980 - DNA, 37 bp, Artificial Sequence
  synthetic circulating small noncoding RNA (sncRNA) 5' transfer RNA (tRNA) half
tctcagggtcgtgggttcgagccccacgttgggcgca

SEQ ID NO: 22981 - DNA, 27 bp, Artificial Sequence
  synthetic circulating small noncoding RNA (sncRNA) 5' transfer RNA (tRNA) half
agggttcaagtccctgttcgggcgctt

SEQ ID NO: 22982 - DNA, 11 bp, Artificial Sequence
  synthetic circulating small noncoding RNA (sncRNA) 5' transfer RNA (tRNA) half
cgtggccgagt

SEQ ID NO: 22983 - DNA, 25 bp, Artificial Sequence
  synthetic circulating small noncoding RNA (sncRNA) 5' transfer RNA (tRNA) half
ggctcgtccgggatttgaacccggg

SEQ ID NO: 22984 - DNA, 36 bp, Artificial Sequence
  synthetic circulating small noncoding RNA (sncRNA) 5' transfer RNA (tRNA) half
gccgaaacccgggatcgaaccagggacctttagatc

SEQ ID NO: 22985 - DNA, 32 bp, Artificial Sequence
  synthetic circulating small noncoding RNA (sncRNA) 5' transfer RNA (tRNA) half
tccgtagtgtagtggttatcacgttcgcctaa

SEQ ID NO: 22986 - DNA, 19 bp, Artificial Sequence
  synthetic circulating small noncoding RNA (sncRNA) 5' transfer RNA (tRNA) half
atttgaactcgcgacccct

SEQ ID NO: 22987 - DNA, 35 bp, Artificial Sequence
  synthetic circulating small noncoding RNA (sncRNA) 5' transfer RNA (tRNA) half
cagcaacctcggttcgaatccgagtcacggcatta

SEQ ID NO: 22988 - DNA, 27 bp, Artificial Sequence
  synthetic circulating small noncoding RNA (sncRNA) 5' transfer RNA (tRNA) half
ttggtggttcaatggtagaattctcgc

SEQ ID NO: 22989 - DNA, 17 bp, Artificial Sequence
  synthetic circulating small noncoding RNA (sncRNA) 5' transfer RNA (tRNA) half
cggatagctcagtcggt

SEQ ID NO: 22990 - DNA, 29 bp, Artificial Sequence
  synthetic circulating small noncoding RNA (sncRNA) 5' transfer RNA (tRNA) half
cctcccgcgtggcaggcgagaattctacc

SEQ ID NO: 22991 - DNA, 33 bp, Artificial Sequence
  synthetic circulating small noncoding RNA (sncRNA) 5' transfer RNA (tRNA) half
tgctgcggccacaacgcagagtactaaccacta

SEQ ID NO: 22992 - DNA, 40 bp, Artificial Sequence
  synthetic circulating small noncoding RNA (sncRNA) 5' transfer RNA (tRNA) half
gagcgccgaatcctaaccactagaccaccagggaagagat

SEQ ID NO: 22993 - DNA, 21 bp, Artificial Sequence
  synthetic circulating small noncoding RNA (sncRNA) 5' transfer RNA (tRNA) half
aaaaatgttcccgcccggttt

SEQ ID NO: 22994 - DNA, 26 bp, Artificial Sequence
  synthetic circulating small noncoding RNA (sncRNA) 5' transfer RNA (tRNA) half
gaattctaccattgaactaccaatgc

SEQ ID NO: 22995 - DNA, 29 bp, Artificial Sequence
  synthetic circulating small noncoding RNA (sncRNA) 5' transfer RNA (tRNA) half
tgaaccggggacctcttgatctgcagtca

SEQ ID NO: 22996 - DNA, 30 bp, Artificial Sequence
  synthetic circulating small noncoding RNA (sncRNA) 5' transfer RNA (tRNA) half
gaccggggttcgattccccgacggggagtc

SEQ ID NO: 22997 - DNA, 15 bp, Artificial Sequence
  synthetic circulating small noncoding RNA (sncRNA) 5' transfer RNA (tRNA) half
ccactcggccatcgc

SEQ ID NO: 22998 - DNA, 22 bp, Artificial Sequence
  synthetic circulating small noncoding RNA (sncRNA) 5' transfer RNA (tRNA) half
tcctcgttagtatagtggtgag

SEQ ID NO: 22999 - DNA, 25 bp, Artificial Sequence
  synthetic circulating small noncoding RNA (sncRNA) 5' transfer RNA (tRNA) half
gcgagaattctaccattgaaccacc

SEQ ID NO: 23000 - DNA, 27 bp, Artificial Sequence
  synthetic circulating small noncoding RNA (sncRNA) 5' transfer RNA (tRNA) half
acctgtgcggggaaaccccattggatt

SEQ ID NO: 23001 - DNA, 16 bp, Artificial Sequence
  synthetic circulating small noncoding RNA (sncRNA) 5' transfer RNA (tRNA) half
gtgaggtcccaccgag

SEQ ID NO: 23002 - DNA, 25 bp, Artificial Sequence
  synthetic circulating small noncoding RNA (sncRNA) 5' transfer RNA (tRNA) half
gcccggctagctcagtcggtagagc

SEQ ID NO: 23003 - DNA, 11 bp, Artificial Sequence
  synthetic circulating small noncoding RNA (sncRNA) 5' transfer RNA (tRNA) half
gccttaaccac

SEQ ID NO: 23004 - DNA, 30 bp, Artificial Sequence
  synthetic circulating small noncoding RNA (sncRNA) 5' transfer RNA (tRNA) half
gtttccgtagtgtagtggttagcgcgttcg

SEQ ID NO: 23005 - DNA, 25 bp, Artificial Sequence
  synthetic circulating small noncoding RNA (sncRNA) 5' transfer RNA (tRNA) half
tgccggggatcgaacccggggcctc

SEQ ID NO: 23006 - DNA, 44 bp, Artificial Sequence
  synthetic circulating small noncoding RNA (sncRNA) 5' transfer RNA (tRNA) half
ttttcacccaggcggcccgggttcgactcccggtgtgggaacgc

SEQ ID NO: 23007 - DNA, 22 bp, Artificial Sequence
  synthetic circulating small noncoding RNA (sncRNA) 5' transfer RNA (tRNA) half
gttcgattcccggtcagggaag

SEQ ID NO: 23008 - DNA, 20 bp, Artificial Sequence
  synthetic circulating small noncoding RNA (sncRNA) 5' transfer RNA (tRNA) half
gcgccttagaccgctcggcc

SEQ ID NO: 23009 - DNA, 28 bp, Artificial Sequence
  synthetic circulating small noncoding RNA (sncRNA) 5' transfer RNA (tRNA) half
aggtagcgggatcgatgcccgcattctc

SEQ ID NO: 23010 - DNA, 15 bp, Artificial Sequence
  synthetic circulating small noncoding RNA (sncRNA) 5' transfer RNA (tRNA) half
aggaccttcagatta

SEQ ID NO: 23011 - DNA, 26 bp, Artificial Sequence
  synthetic circulating small noncoding RNA (sncRNA) 5' transfer RNA (tRNA) half
atcgtataggggttagtactctgcgt

SEQ ID NO: 23012 - DNA, 14 bp, Artificial Sequence
  synthetic circulating small noncoding RNA (sncRNA) 5' transfer RNA (tRNA) half
gggctcgaacaggg

SEQ ID NO: 23013 - DNA, 10 bp, Artificial Sequence
  synthetic circulating small noncoding RNA (sncRNA) 5' transfer RNA (tRNA) half
gaaccaccaa

SEQ ID NO: 23014 - DNA, 33 bp, Artificial Sequence
  synthetic circulating small noncoding RNA (sncRNA) 5' transfer RNA (tRNA) half
catgaggccccgggttcgatccccggcacctcc

SEQ ID NO: 23015 - DNA, 18 bp, Artificial Sequence
  synthetic circulating small noncoding RNA (sncRNA) 5' transfer RNA (tRNA) half
aatcctgccgactacgtc

SEQ ID NO: 23016 - DNA, 12 bp, Artificial Sequence
  synthetic circulating small noncoding RNA (sncRNA) 5' transfer RNA (tRNA) half
gggaatcgaacc

SEQ ID NO: 23017 - DNA, 21 bp, Artificial Sequence
  synthetic circulating small noncoding RNA (sncRNA) 5' transfer RNA (tRNA) half
tttgggctcgtccgggatttg

SEQ ID NO: 23018 - DNA, 18 bp, Artificial Sequence
  synthetic circulating small noncoding RNA (sncRNA) 5' transfer RNA (tRNA) half
tcctgccgcggtcgactt

SEQ ID NO: 23019 - DNA, 18 bp, Artificial Sequence
  synthetic circulating small noncoding RNA (sncRNA) 5' transfer RNA (tRNA) half
gcggcccgggttcgattc

SEQ ID NO: 23020 - DNA, 36 bp, Artificial Sequence
  synthetic circulating small noncoding RNA (sncRNA) 5' transfer RNA (tRNA) half
tcgcccggctagctcagtcggtagagcatgagactc

SEQ ID NO: 23021 - DNA, 23 bp, Artificial Sequence
  synthetic circulating small noncoding RNA (sncRNA) 5' transfer RNA (tRNA) half
tcagtggtctggggtgcaggctt

SEQ ID NO: 23022 - DNA, 14 bp, Artificial Sequence
  synthetic circulating small noncoding RNA (sncRNA) 5' transfer RNA (tRNA) half
gctgcgccactctg

SEQ ID NO: 23023 - DNA, 8 bp, Artificial Sequence
  synthetic circulating small noncoding RNA (sncRNA) 5' transfer RNA (tRNA) half
acaggcgg

SEQ ID NO: 23024 - DNA, 12 bp, Artificial Sequence
  synthetic circulating small noncoding RNA (sncRNA) 5' transfer RNA (tRNA) half
gtggtagaattc

SEQ ID NO: 23025 - DNA, 15 bp, Artificial Sequence
  synthetic circulating small noncoding RNA (sncRNA) 5' transfer RNA (tRNA) half
ccacgcctccattcg

SEQ ID NO: 23026 - DNA, 23 bp, Artificial Sequence
  synthetic circulating small noncoding RNA (sncRNA) 5' transfer RNA (tRNA) half
ctgccgaaacccgggatcgaacc

SEQ ID NO: 23027 - DNA, 22 bp, Artificial Sequence
  synthetic circulating small noncoding RNA (sncRNA) 5' transfer RNA (tRNA) half
acaagggttccttcgagccgga

SEQ ID NO: 23028 - DNA, 27 bp, Artificial Sequence
  synthetic circulating small noncoding RNA (sncRNA) 5' transfer RNA (tRNA) half
cgtgccattgttgccacaatgccgtga

SEQ ID NO: 23029 - DNA, 14 bp, Artificial Sequence
  synthetic circulating small noncoding RNA (sncRNA) 5' transfer RNA (tRNA) half
gaggtcccgggttc

SEQ ID NO: 23030 - DNA, 37 bp, Artificial Sequence
  synthetic circulating small noncoding RNA (sncRNA) 5' transfer RNA (tRNA) half
agcgccgaatcctaaccactagaccaccagggaaact

SEQ ID NO: 23031 - DNA, 23 bp, Artificial Sequence
  synthetic circulating small noncoding RNA (sncRNA) 5' transfer RNA (tRNA) half
agattaagagtctcatgctctac

SEQ ID NO: 23032 - DNA, 16 bp, Artificial Sequence
  synthetic circulating small noncoding RNA (sncRNA) 5' transfer RNA (tRNA) half
cgaacaggattcgaac

SEQ ID NO: 23033 - DNA, 8 bp, Artificial Sequence
  synthetic circulating small noncoding RNA (sncRNA) 5' transfer RNA (tRNA) half
gcacccgg

SEQ ID NO: 23034 - DNA, 14 bp, Artificial Sequence
  synthetic circulating small noncoding RNA (sncRNA) 5' transfer RNA (tRNA) half
aatcatacccctag

SEQ ID NO: 23035 - DNA, 16 bp, Artificial Sequence
  synthetic circulating small noncoding RNA (sncRNA) 5' transfer RNA (tRNA) half
gttcgattcccgggcg

SEQ ID NO: 23036 - DNA, 19 bp, Artificial Sequence
  synthetic circulating small noncoding RNA (sncRNA) 5' transfer RNA (tRNA) half
ccgcagcaacctcggttcg

SEQ ID NO: 23037 - DNA, 32 bp, Artificial Sequence
  synthetic circulating small noncoding RNA (sncRNA) 5' transfer RNA (tRNA) half
ccacgaccctgggattaagagtcccatgctct

SEQ ID NO: 23038 - DNA, 29 bp, Artificial Sequence
  synthetic circulating small noncoding RNA (sncRNA) 5' transfer RNA (tRNA) half
ggggtatgattctcgcttagggtgcgaga

SEQ ID NO: 23039 - DNA, 27 bp, Artificial Sequence
  synthetic circulating small noncoding RNA (sncRNA) 5' transfer RNA (tRNA) half
ctgaggttcgaactcaggaccttcaga

SEQ ID NO: 23040 - DNA, 39 bp, Artificial Sequence
  synthetic circulating small noncoding RNA (sncRNA) 5' transfer RNA (tRNA) half
cgtatggaggcgtgggttcgaatcccacttctgacacag

SEQ ID NO: 23041 - DNA, 11 bp, Artificial Sequence
  synthetic circulating small noncoding RNA (sncRNA) 5' transfer RNA (tRNA) half
aacccgcaacc

SEQ ID NO: 23042 - DNA, 27 bp, Artificial Sequence
  synthetic circulating small noncoding RNA (sncRNA) 5' transfer RNA (tRNA) half
gcccaacgtggggttcgaacccacgac

SEQ ID NO: 23043 - DNA, 18 bp, Artificial Sequence
  synthetic circulating small noncoding RNA (sncRNA) 5' transfer RNA (tRNA) half
gagccaggtaggagtcga

SEQ ID NO: 23044 - DNA, 20 bp, Artificial Sequence
  synthetic circulating small noncoding RNA (sncRNA) 5' transfer RNA (tRNA) half
tgaccactacactacggaaa

SEQ ID NO: 23045 - DNA, 29 bp, Artificial Sequence
  synthetic circulating small noncoding RNA (sncRNA) 5' transfer RNA (tRNA) half
gttccatagggtagtggttatcacatctg

SEQ ID NO: 23046 - DNA, 26 bp, Artificial Sequence
  synthetic circulating small noncoding RNA (sncRNA) 5' transfer RNA (tRNA) half
gtcagaagtgggattcgaacccacgc

SEQ ID NO: 23047 - DNA, 35 bp, Artificial Sequence
  synthetic circulating small noncoding RNA (sncRNA) 5' transfer RNA (tRNA) half
tggtggtctagtggttaggattcggcgctctcacc

SEQ ID NO: 23048 - DNA, 34 bp, Artificial Sequence
  synthetic circulating small noncoding RNA (sncRNA) 5' transfer RNA (tRNA) half
cccgtcggggaattgaaccccggtctcccgcgtg

SEQ ID NO: 23049 - DNA, 25 bp, Artificial Sequence
  synthetic circulating small noncoding RNA (sncRNA) 5' transfer RNA (tRNA) half
tagatcttcagtctaacgctctccc

SEQ ID NO: 23050 - DNA, 31 bp, Artificial Sequence
  synthetic circulating small noncoding RNA (sncRNA) 5' transfer RNA (tRNA) half
gatcctgggttcgaatcccagcggggccttt

SEQ ID NO: 23051 - DNA, 21 bp, Artificial Sequence
  synthetic circulating small noncoding RNA (sncRNA) 5' transfer RNA (tRNA) half
gggttcgaacccacgcagaca

SEQ ID NO: 23052 - DNA, 22 bp, Artificial Sequence
  synthetic circulating small noncoding RNA (sncRNA) 5' transfer RNA (tRNA) half
atggttagcactctggactttg

SEQ ID NO: 23053 - DNA, 16 bp, Artificial Sequence
  synthetic circulating small noncoding RNA (sncRNA) 5' transfer RNA (tRNA) half
gtatgaggccccgggt

SEQ ID NO: 23054 - DNA, 21 bp, Artificial Sequence
  synthetic circulating small noncoding RNA (sncRNA) 5' transfer RNA (tRNA) half
agtgggtagagcatgagactc

SEQ ID NO: 23055 - DNA, 16 bp, Artificial Sequence
  synthetic circulating small noncoding RNA (sncRNA) 5' transfer RNA (tRNA) half
tggccgagtggttaag

SEQ ID NO: 23056 - DNA, 15 bp, Artificial Sequence
  synthetic circulating small noncoding RNA (sncRNA) 5' transfer RNA (tRNA) half
tcccggtcagggaaa

SEQ ID NO: 23057 - DNA, 21 bp, Artificial Sequence
  synthetic circulating small noncoding RNA (sncRNA) 5' transfer RNA (tRNA) half
gttgggagagcgttagactga

SEQ ID NO: 23058 - DNA, 11 bp, Artificial Sequence
  synthetic circulating small noncoding RNA (sncRNA) 5' transfer RNA (tRNA) half
cccgggttcga

SEQ ID NO: 23059 - DNA, 21 bp, Artificial Sequence
  synthetic circulating small noncoding RNA (sncRNA) 5' transfer RNA (tRNA) half
aaaagtctgatgctctaccga

SEQ ID NO: 23060 - DNA, 28 bp, Artificial Sequence
  synthetic circulating small noncoding RNA (sncRNA) 5' transfer RNA (tRNA) half
agtcccatgctgtaccgactgagccagc

SEQ ID NO: 23061 - DNA, 9 bp, Artificial Sequence
  synthetic circulating small noncoding RNA (sncRNA) 5' transfer RNA (tRNA) half
gaggccccg

SEQ ID NO: 23062 - DNA, 20 bp, Artificial Sequence
  synthetic circulating small noncoding RNA (sncRNA) 5' transfer RNA (tRNA) half
actagtctccccgtcgggga

SEQ ID NO: 23063 - DNA, 44 bp, Artificial Sequence
  synthetic circulating small noncoding RNA (sncRNA) 5' transfer RNA (tRNA) half
acccgggccgcggcggtgagagcgccgaatcctaaccactagac

SEQ ID NO: 23064 - DNA, 35 bp, Artificial Sequence
  synthetic circulating small noncoding RNA (sncRNA) 5' transfer RNA (tRNA) half
gattaagagtcccatgctctaccgactgagctagc

SEQ ID NO: 23065 - DNA, 44 bp, Artificial Sequence
  synthetic circulating small noncoding RNA (sncRNA) 5' transfer RNA (tRNA) half
agcctccccgtcggggaatcgaaccccggtctcccgcgtgacag

SEQ ID NO: 23066 - DNA, 24 bp, Artificial Sequence
  synthetic circulating small noncoding RNA (sncRNA) 5' transfer RNA (tRNA) half
cgtgacaggcggggatactaacca

SEQ ID NO: 23067 - DNA, 17 bp, Artificial Sequence
  synthetic circulating small noncoding RNA (sncRNA) 5' transfer RNA (tRNA) half
aaccgaagatcacgggt

SEQ ID NO: 23068 - DNA, 24 bp, Artificial Sequence
  synthetic circulating small noncoding RNA (sncRNA) 5' transfer RNA (tRNA) half
ctccttcgagccggattcgaacca

SEQ ID NO: 23069 - DNA, 21 bp, Artificial Sequence
  synthetic circulating small noncoding RNA (sncRNA) 5' transfer RNA (tRNA) half
tgccccctctgaggttcgaac

SEQ ID NO: 23070 - DNA, 18 bp, Artificial Sequence
  synthetic circulating small noncoding RNA (sncRNA) 5' transfer RNA (tRNA) half
aggtcccaccgagatttg

SEQ ID NO: 23071 - DNA, 15 bp, Artificial Sequence
  synthetic circulating small noncoding RNA (sncRNA) 5' transfer RNA (tRNA) half
gaagattgagggttc

SEQ ID NO: 23072 - DNA, 23 bp, Artificial Sequence
  synthetic circulating small noncoding RNA (sncRNA) 5' transfer RNA (tRNA) half
cgaacccgcgaccttggcgttat

SEQ ID NO: 23073 - DNA, 23 bp, Artificial Sequence
  synthetic circulating small noncoding RNA (sncRNA) 5' transfer RNA (tRNA) half
agtactaaccactatacgatcac

SEQ ID NO: 23074 - DNA, 7 bp, Artificial Sequence
  synthetic circulating small noncoding RNA (sncRNA) 5' transfer RNA (tRNA) half
cgcagcg

SEQ ID NO: 23075 - DNA, 18 bp, Artificial Sequence
  synthetic circulating small noncoding RNA (sncRNA) 5' transfer RNA (tRNA) half
aagcagttgacccgggtt

SEQ ID NO: 23076 - DNA, 33 bp, Artificial Sequence
  synthetic circulating small noncoding RNA (sncRNA) 5' transfer RNA (tRNA) half
ggggggtaaagctcaggggtagagcatttgact

SEQ ID NO: 23077 - DNA, 44 bp, Artificial Sequence
  synthetic circulating small noncoding RNA (sncRNA) 5' transfer RNA (tRNA) half
gtccctgggtgggctcgaaccaccaacctttcggttaacagccg

SEQ ID NO: 23078 - DNA, 17 bp, Artificial Sequence
  synthetic circulating small noncoding RNA (sncRNA) 5' transfer RNA (tRNA) half
catgggtggttcagtgg

SEQ ID NO: 23079 - DNA, 20 bp, Artificial Sequence
  synthetic circulating small noncoding RNA (sncRNA) 5' transfer RNA (tRNA) half
acccacgaccctgagattaa

SEQ ID NO: 23080 - DNA, 16 bp, Artificial Sequence
  synthetic circulating small noncoding RNA (sncRNA) 5' transfer RNA (tRNA) half
cgattcccggcccatg

SEQ ID NO: 23081 - DNA, 21 bp, Artificial Sequence
  synthetic circulating small noncoding RNA (sncRNA) 5' transfer RNA (tRNA) half
caattggtagagcatcagact

SEQ ID NO: 23082 - DNA, 34 bp, Artificial Sequence
  synthetic circulating small noncoding RNA (sncRNA) 5' transfer RNA (tRNA) half
taagcgagcgctctaccatttgagctaatccccc

SEQ ID NO: 23083 - DNA, 11 bp, Artificial Sequence
  synthetic circulating small noncoding RNA (sncRNA) 5' transfer RNA (tRNA) half
gtcggggaatc

SEQ ID NO: 23084 - DNA, 17 bp, Artificial Sequence
  synthetic circulating small noncoding RNA (sncRNA) 5' transfer RNA (tRNA) half
aatgccttatccattag

SEQ ID NO: 23085 - DNA, 17 bp, Artificial Sequence
  synthetic circulating small noncoding RNA (sncRNA) 5' transfer RNA (tRNA) half
gaacacgcagccttctg

SEQ ID NO: 23086 - DNA, 20 bp, Artificial Sequence
  synthetic circulating small noncoding RNA (sncRNA) 5' transfer RNA (tRNA) half
tggttatcacgttcgcctca

SEQ ID NO: 23087 - DNA, 19 bp, Artificial Sequence
  synthetic circulating small noncoding RNA (sncRNA) 5' transfer RNA (tRNA) half
agaatcatacccctagacc

SEQ ID NO: 23088 - DNA, 31 bp, Artificial Sequence
  synthetic circulating small noncoding RNA (sncRNA) 5' transfer RNA (tRNA) half
gccagtgccttatccattaggccactggggc

SEQ ID NO: 23089 - DNA, 26 bp, Artificial Sequence
  synthetic circulating small noncoding RNA (sncRNA) 5' transfer RNA (tRNA) half
aattctaccactgaaccaccaatgcc

SEQ ID NO: 23090 - DNA, 16 bp, Artificial Sequence
  synthetic circulating small noncoding RNA (sncRNA) 5' transfer RNA (tRNA) half
atgccttatccattag

SEQ ID NO: 23091 - DNA, 30 bp, Artificial Sequence
  synthetic circulating small noncoding RNA (sncRNA) 5' transfer RNA (tRNA) half
gtggtagaattctcgcctgccacgcgggag

SEQ ID NO: 23092 - DNA, 13 bp, Artificial Sequence
  synthetic circulating small noncoding RNA (sncRNA) 5' transfer RNA (tRNA) half
cgtatggaggcgt

SEQ ID NO: 23093 - DNA, 39 bp, Artificial Sequence
  synthetic circulating small noncoding RNA (sncRNA) 5' transfer RNA (tRNA) half
acgcagaaggtcctgggttcgagccccagtggaaccagt

SEQ ID NO: 23094 - DNA, 22 bp, Artificial Sequence
  synthetic circulating small noncoding RNA (sncRNA) 5' transfer RNA (tRNA) half
gccttaaccactcggccaccgt

SEQ ID NO: 23095 - DNA, 30 bp, Artificial Sequence
  synthetic circulating small noncoding RNA (sncRNA) 5' transfer RNA (tRNA) half
ccccatcggggaatcgaaccccggtctcct

SEQ ID NO: 23096 - DNA, 20 bp, Artificial Sequence
  synthetic circulating small noncoding RNA (sncRNA) 5' transfer RNA (tRNA) half
gaagcgagaatcatacccct

SEQ ID NO: 23097 - DNA, 36 bp, Artificial Sequence
  synthetic circulating small noncoding RNA (sncRNA) 5' transfer RNA (tRNA) half
tggcagtggtgggattcgaacccacgcctccgaaga

SEQ ID NO: 23098 - DNA, 30 bp, Artificial Sequence
  synthetic circulating small noncoding RNA (sncRNA) 5' transfer RNA (tRNA) half
taggattcggcgctctcaccgccgcggccc

SEQ ID NO: 23099 - DNA, 15 bp, Artificial Sequence
  synthetic circulating small noncoding RNA (sncRNA) 5' transfer RNA (tRNA) half
ccacgcctccgaaga

SEQ ID NO: 23100 - DNA, 42 bp, Artificial Sequence
  synthetic circulating small noncoding RNA (sncRNA) 5' transfer RNA (tRNA) half
tctcgcgtgttaggcgagcgtgatgaccactacactacggaa

SEQ ID NO: 23101 - DNA, 44 bp, Artificial Sequence
  synthetic circulating small noncoding RNA (sncRNA) 5' transfer RNA (tRNA) half
cgcctccccgtcggggaatcgaaccccggtctcccgcgtgacag

SEQ ID NO: 23102 - DNA, 17 bp, Artificial Sequence
  synthetic circulating small noncoding RNA (sncRNA) 5' transfer RNA (tRNA) half
cattacaccatgggacc

SEQ ID NO: 23103 - DNA, 21 bp, Artificial Sequence
  synthetic circulating small noncoding RNA (sncRNA) 5' transfer RNA (tRNA) half
ccgggacctctcgcacccaaa

SEQ ID NO: 23104 - DNA, 19 bp, Artificial Sequence
  synthetic circulating small noncoding RNA (sncRNA) 5' transfer RNA (tRNA) half
aagcagttgacccgggttc

SEQ ID NO: 23105 - DNA, 12 bp, Artificial Sequence
  synthetic circulating small noncoding RNA (sncRNA) 5' transfer RNA (tRNA) half
gattcccggcca

SEQ ID NO: 23106 - DNA, 10 bp, Artificial Sequence
  synthetic circulating small noncoding RNA (sncRNA) 5' transfer RNA (tRNA) half
aacccgggcc

SEQ ID NO: 23107 - DNA, 17 bp, Artificial Sequence
  synthetic circulating small noncoding RNA (sncRNA) 5' transfer RNA (tRNA) half
aaccaccaacctttcgg

SEQ ID NO: 23108 - DNA, 13 bp, Artificial Sequence
  synthetic circulating small noncoding RNA (sncRNA) 5' transfer RNA (tRNA) half
ccgctggtgtagt

SEQ ID NO: 23109 - DNA, 19 bp, Artificial Sequence
  synthetic circulating small noncoding RNA (sncRNA) 5' transfer RNA (tRNA) half
cccggatgatcctcagtgg

SEQ ID NO: 23110 - DNA, 33 bp, Artificial Sequence
  synthetic circulating small noncoding RNA (sncRNA) 5' transfer RNA (tRNA) half
actctggcgggactcgaacccgcaacctttgaa

SEQ ID NO: 23111 - DNA, 21 bp, Artificial Sequence
  synthetic circulating small noncoding RNA (sncRNA) 5' transfer RNA (tRNA) half
gtttccgtagtgtagtggtca

SEQ ID NO: 23112 - DNA, 34 bp, Artificial Sequence
  synthetic circulating small noncoding RNA (sncRNA) 5' transfer RNA (tRNA) half
tcgcccggctagctcagtcggtagagcatgagac

SEQ ID NO: 23113 - DNA, 13 bp, Artificial Sequence
  synthetic circulating small noncoding RNA (sncRNA) 5' transfer RNA (tRNA) half
caccgccgcggcc

SEQ ID NO: 23114 - DNA, 23 bp, Artificial Sequence
  synthetic circulating small noncoding RNA (sncRNA) 5' transfer RNA (tRNA) half
ttgaacccgggacctctcgcacc

SEQ ID NO: 23115 - DNA, 16 bp, Artificial Sequence
  synthetic circulating small noncoding RNA (sncRNA) 5' transfer RNA (tRNA) half
ggatggccgagcggtc

SEQ ID NO: 23116 - DNA, 22 bp, Artificial Sequence
  synthetic circulating small noncoding RNA (sncRNA) 5' transfer RNA (tRNA) half
gggattagctcaaatggtagag

SEQ ID NO: 23117 - DNA, 14 bp, Artificial Sequence
  synthetic circulating small noncoding RNA (sncRNA) 5' transfer RNA (tRNA) half
ctagaccatgtggg

SEQ ID NO: 23118 - DNA, 37 bp, Artificial Sequence
  synthetic circulating small noncoding RNA (sncRNA) 5' transfer RNA (tRNA) half
gtctggcgccttagaccactcggccatcctgacactt

SEQ ID NO: 23119 - DNA, 13 bp, Artificial Sequence
  synthetic circulating small noncoding RNA (sncRNA) 5' transfer RNA (tRNA) half
tactaaccactat

SEQ ID NO: 23120 - DNA, 11 bp, Artificial Sequence
  synthetic circulating small noncoding RNA (sncRNA) 5' transfer RNA (tRNA) half
aggcgagaatt

SEQ ID NO: 23121 - DNA, 18 bp, Artificial Sequence
  synthetic circulating small noncoding RNA (sncRNA) 5' transfer RNA (tRNA) half
tacagtcctccgctctac

SEQ ID NO: 23122 - DNA, 6 bp, Artificial Sequence
  synthetic circulating small noncoding RNA (sncRNA) 5' transfer RNA (tRNA) half
cactcg

SEQ ID NO: 23123 - DNA, 23 bp, Artificial Sequence
  synthetic circulating small noncoding RNA (sncRNA) 5' transfer RNA (tRNA) half
agaattctaccactgaaccacca

SEQ ID NO: 23124 - DNA, 27 bp, Artificial Sequence
  synthetic circulating small noncoding RNA (sncRNA) 5' transfer RNA (tRNA) half
ttcgcctcacacgcgaaaggtccccgg

SEQ ID NO: 23125 - DNA, 21 bp, Artificial Sequence
  synthetic circulating small noncoding RNA (sncRNA) 5' transfer RNA (tRNA) half
gggttcgattcccgggcggcg

SEQ ID NO: 23126 - DNA, 27 bp, Artificial Sequence
  synthetic circulating small noncoding RNA (sncRNA) 5' transfer RNA (tRNA) half
gtctcccgcgtgacaggcggggatact

SEQ ID NO: 23127 - DNA, 21 bp, Artificial Sequence
  synthetic circulating small noncoding RNA (sncRNA) 5' transfer RNA (tRNA) half
gctctaccatttgagctaatc

SEQ ID NO: 23128 - DNA, 15 bp, Artificial Sequence
  synthetic circulating small noncoding RNA (sncRNA) 5' transfer RNA (tRNA) half
tggtttcgatccatc

SEQ ID NO: 23129 - DNA, 14 bp, Artificial Sequence
  synthetic circulating small noncoding RNA (sncRNA) 5' transfer RNA (tRNA) half
ctaccgactgagct

SEQ ID NO: 23130 - DNA, 24 bp, Artificial Sequence
  synthetic circulating small noncoding RNA (sncRNA) 5' transfer RNA (tRNA) half
atgcgagaggtagtgggatcgatg

SEQ ID NO: 23131 - DNA, 17 bp, Artificial Sequence
  synthetic circulating small noncoding RNA (sncRNA) 5' transfer RNA (tRNA) half
tcgattcccggtcaggg

SEQ ID NO: 23132 - DNA, 32 bp, Artificial Sequence
  synthetic circulating small noncoding RNA (sncRNA) 5' transfer RNA (tRNA) half
tgcatgaggccccgggttcgatccccggcacc

SEQ ID NO: 23133 - DNA, 14 bp, Artificial Sequence
  synthetic circulating small noncoding RNA (sncRNA) 5' transfer RNA (tRNA) half
tcccggcccatgca

SEQ ID NO: 23134 - DNA, 22 bp, Artificial Sequence
  synthetic circulating small noncoding RNA (sncRNA) 5' transfer RNA (tRNA) half
gttcaaatcacgtcggggtcaa

SEQ ID NO: 23135 - DNA, 15 bp, Artificial Sequence
  synthetic circulating small noncoding RNA (sncRNA) 5' transfer RNA (tRNA) half
caaggtcgcgggttc

SEQ ID NO: 23136 - DNA, 5 bp, Artificial Sequence
  synthetic circulating small noncoding RNA (sncRNA) 5' transfer RNA (tRNA) half
gccga

SEQ ID NO: 23137 - DNA, 11 bp, Artificial Sequence
  synthetic circulating small noncoding RNA (sncRNA) 5' transfer RNA (tRNA) half
gccgggactcg

SEQ ID NO: 23138 - DNA, 39 bp, Artificial Sequence
  synthetic circulating small noncoding RNA (sncRNA) 5' transfer RNA (tRNA) half
gcagcggtgggattcgaacccacgcccccgaagagactg

SEQ ID NO: 23139 - DNA, 18 bp, Artificial Sequence
  synthetic circulating small noncoding RNA (sncRNA) 5' transfer RNA (tRNA) half
gtccctggttcgatcccg

SEQ ID NO: 23140 - DNA, 25 bp, Artificial Sequence
  synthetic circulating small noncoding RNA (sncRNA) 5' transfer RNA (tRNA) half
gccaaatcctaaccactagaccacc

SEQ ID NO: 23141 - DNA, 9 bp, Artificial Sequence
  synthetic circulating small noncoding RNA (sncRNA) 5' transfer RNA (tRNA) half
tgccgtgac

SEQ ID NO: 23142 - DNA, 31 bp, Artificial Sequence
  synthetic circulating small noncoding RNA (sncRNA) 5' transfer RNA (tRNA) half
ggaatcgaaccccggtctcccgcgtgacagg

SEQ ID NO: 23143 - DNA, 24 bp, Artificial Sequence
  synthetic circulating small noncoding RNA (sncRNA) 5' transfer RNA (tRNA) half
cgcgtggcaggcgagaattctacc

SEQ ID NO: 23144 - DNA, 31 bp, Artificial Sequence
  synthetic circulating small noncoding RNA (sncRNA) 5' transfer RNA (tRNA) half
tctaacgctctcccaactgagctatttcggc

SEQ ID NO: 23145 - DNA, 21 bp, Artificial Sequence
  synthetic circulating small noncoding RNA (sncRNA) 5' transfer RNA (tRNA) half
tcaggatggccgagtggtcta

SEQ ID NO: 23146 - DNA, 16 bp, Artificial Sequence
  synthetic circulating small noncoding RNA (sncRNA) 5' transfer RNA (tRNA) half
agctggctcgttggtc

SEQ ID NO: 23147 - DNA, 27 bp, Artificial Sequence
  synthetic circulating small noncoding RNA (sncRNA) 5' transfer RNA (tRNA) half
gcaggttcgaatcctgccgactacgtc

SEQ ID NO: 23148 - DNA, 13 bp, Artificial Sequence
  synthetic circulating small noncoding RNA (sncRNA) 5' transfer RNA (tRNA) half
atccggctcgaag

SEQ ID NO: 23149 - DNA, 38 bp, Artificial Sequence
  synthetic circulating small noncoding RNA (sncRNA) 5' transfer RNA (tRNA) half
gggtgggctcgaaccaccaacctttcggttaacagccg

SEQ ID NO: 23150 - DNA, 33 bp, Artificial Sequence
  synthetic circulating small noncoding RNA (sncRNA) 5' transfer RNA (tRNA) half
ggcccggatagctcagtcggtagagcatcagac

SEQ ID NO: 23151 - DNA, 12 bp, Artificial Sequence
  synthetic circulating small noncoding RNA (sncRNA) 5' transfer RNA (tRNA) half
tcacgttcgcct

SEQ ID NO: 23152 - DNA, 16 bp, Artificial Sequence
  synthetic circulating small noncoding RNA (sncRNA) 5' transfer RNA (tRNA) half
ggatttgaaccagaga

SEQ ID NO: 23153 - DNA, 22 bp, Artificial Sequence
  synthetic circulating small noncoding RNA (sncRNA) 5' transfer RNA (tRNA) half
tgatgctctaccgactgagcta

SEQ ID NO: 23154 - DNA, 44 bp, Artificial Sequence
  synthetic circulating small noncoding RNA (sncRNA) 5' transfer RNA (tRNA) half
tacctccccgtcggggaatcgaaccccggtctcccgcgtgacag

SEQ ID NO: 23155 - DNA, 13 bp, Artificial Sequence
  synthetic circulating small noncoding RNA (sncRNA) 5' transfer RNA (tRNA) half
aaggtccctggtt

SEQ ID NO: 23156 - DNA, 16 bp, Artificial Sequence
  synthetic circulating small noncoding RNA (sncRNA) 5' transfer RNA (tRNA) half
atgggcccagcacgct

SEQ ID NO: 23157 - DNA, 21 bp, Artificial Sequence
  synthetic circulating small noncoding RNA (sncRNA) 5' transfer RNA (tRNA) half
gtgaggcgaacgtgataacca

SEQ ID NO: 23158 - DNA, 20 bp, Artificial Sequence
  synthetic circulating small noncoding RNA (sncRNA) 5' transfer RNA (tRNA) half
ggcggggatactcaccacta

SEQ ID NO: 23159 - DNA, 16 bp, Artificial Sequence
  synthetic circulating small noncoding RNA (sncRNA) 5' transfer RNA (tRNA) half
ctcccaactgagctat

SEQ ID NO: 23160 - DNA, 31 bp, Artificial Sequence
  synthetic circulating small noncoding RNA (sncRNA) 5' transfer RNA (tRNA) half
gagaccggggttcgattccccgacggggagt

SEQ ID NO: 23161 - DNA, 24 bp, Artificial Sequence
  synthetic circulating small noncoding RNA (sncRNA) 5' transfer RNA (tRNA) half
gggggtatagctcaggggtagagc

SEQ ID NO: 23162 - DNA, 43 bp, Artificial Sequence
  synthetic circulating small noncoding RNA (sncRNA) 5' transfer RNA (tRNA) half
gccacgcgggaggcccgggttcgattcccggccaatgcacgat

SEQ ID NO: 23163 - DNA, 13 bp, Artificial Sequence
  synthetic circulating small noncoding RNA (sncRNA) 5' transfer RNA (tRNA) half
gcgagaggtcccc

SEQ ID NO: 23164 - DNA, 6 bp, Artificial Sequence
  synthetic circulating small noncoding RNA (sncRNA) 5' transfer RNA (tRNA) half
agaccg

SEQ ID NO: 23165 - DNA, 25 bp, Artificial Sequence
  synthetic circulating small noncoding RNA (sncRNA) 5' transfer RNA (tRNA) half
ccgtgatcgtataggggttagtact

SEQ ID NO: 23166 - DNA, 16 bp, Artificial Sequence
  synthetic circulating small noncoding RNA (sncRNA) 5' transfer RNA (tRNA) half
ggtctggggtgcaggc

SEQ ID NO: 23167 - DNA, 16 bp, Artificial Sequence
  synthetic circulating small noncoding RNA (sncRNA) 5' transfer RNA (tRNA) half
atcccaccgctgccag

SEQ ID NO: 23168 - DNA, 16 bp, Artificial Sequence
  synthetic circulating small noncoding RNA (sncRNA) 5' transfer RNA (tRNA) half
tcgtagtcggcaggat

SEQ ID NO: 23169 - DNA, 16 bp, Artificial Sequence
  synthetic circulating small noncoding RNA (sncRNA) 5' transfer RNA (tRNA) half
cccggtatgggaacag

SEQ ID NO: 23170 - DNA, 41 bp, Artificial Sequence
  synthetic circulating small noncoding RNA (sncRNA) 5' transfer RNA (tRNA) half
cttccaagcagttgacccgggttcgattcccggccaacgca

SEQ ID NO: 23171 - DNA, 13 bp, Artificial Sequence
  synthetic circulating small noncoding RNA (sncRNA) 5' transfer RNA (tRNA) half
ttcagattatgag

SEQ ID NO: 23172 - DNA, 16 bp, Artificial Sequence
  synthetic circulating small noncoding RNA (sncRNA) 5' transfer RNA (tRNA) half
gcccagcatgcttccg

SEQ ID NO: 23173 - DNA, 37 bp, Artificial Sequence
  synthetic circulating small noncoding RNA (sncRNA) 5' transfer RNA (tRNA) half
ctgccctctctgaggttcgaactcaggaccttcagat

SEQ ID NO: 23174 - DNA, 17 bp, Artificial Sequence
  synthetic circulating small noncoding RNA (sncRNA) 5' transfer RNA (tRNA) half
gagactgcgacctgaac

SEQ ID NO: 23175 - DNA, 23 bp, Artificial Sequence
  synthetic circulating small noncoding RNA (sncRNA) 5' transfer RNA (tRNA) half
gcgccttagaccgctcggccatc

SEQ ID NO: 23176 - DNA, 44 bp, Artificial Sequence
  synthetic circulating small noncoding RNA (sncRNA) 5' transfer RNA (tRNA) half
acccggatttgaaccggggacctcttgatctgcagtcaaatgct

SEQ ID NO: 23177 - DNA, 34 bp, Artificial Sequence
  synthetic circulating small noncoding RNA (sncRNA) 5' transfer RNA (tRNA) half
agtcaaatgctctaccactgagctatacccccgc

SEQ ID NO: 23178 - DNA, 36 bp, Artificial Sequence
  synthetic circulating small noncoding RNA (sncRNA) 5' transfer RNA (tRNA) half
taagccagggattgtgggttcgagtcccatctgggg

SEQ ID NO: 23179 - DNA, 11 bp, Artificial Sequence
  synthetic circulating small noncoding RNA (sncRNA) 5' transfer RNA (tRNA) half
tcggatcgctg

SEQ ID NO: 23180 - DNA, 20 bp, Artificial Sequence
  synthetic circulating small noncoding RNA (sncRNA) 5' transfer RNA (tRNA) half
cgggacctctcgcacccaaa

SEQ ID NO: 23181 - DNA, 12 bp, Artificial Sequence
  synthetic circulating small noncoding RNA (sncRNA) 5' transfer RNA (tRNA) half
aacccgggtcaa

SEQ ID NO: 23182 - DNA, 22 bp, Artificial Sequence
  synthetic circulating small noncoding RNA (sncRNA) 5' transfer RNA (tRNA) half
gttcgaatcccactcctgacag

SEQ ID NO: 23183 - DNA, 16 bp, Artificial Sequence
  synthetic circulating small noncoding RNA (sncRNA) 5' transfer RNA (tRNA) half
ggagactgcgacctga

SEQ ID NO: 23184 - DNA, 23 bp, Artificial Sequence
  synthetic circulating small noncoding RNA (sncRNA) 5' transfer RNA (tRNA) half
ggattcagagtccagagtgctaa

SEQ ID NO: 23185 - DNA, 32 bp, Artificial Sequence
  synthetic circulating small noncoding RNA (sncRNA) 5' transfer RNA (tRNA) half
aggatggccgagcggtctaaggcgctgcgttc

SEQ ID NO: 23186 - DNA, 38 bp, Artificial Sequence
  synthetic circulating small noncoding RNA (sncRNA) 5' transfer RNA (tRNA) half
gttaggattcggcgctctcaccgccgcggcccgggttc

SEQ ID NO: 23187 - DNA, 14 bp, Artificial Sequence
  synthetic circulating small noncoding RNA (sncRNA) 5' transfer RNA (tRNA) half
cagcgatccgagtt

SEQ ID NO: 23188 - DNA, 7 bp, Artificial Sequence
  synthetic circulating small noncoding RNA (sncRNA) 5' transfer RNA (tRNA) half
ccgggcc

SEQ ID NO: 23189 - DNA, 28 bp, Artificial Sequence
  synthetic circulating small noncoding RNA (sncRNA) 5' transfer RNA (tRNA) half
tgtgaggatcgaactcacgaccttcaga

SEQ ID NO: 23190 - DNA, 28 bp, Artificial Sequence
  synthetic circulating small noncoding RNA (sncRNA) 5' transfer RNA (tRNA) half
tcgcgagttcaaatctcgctggggcctg

SEQ ID NO: 23191 - DNA, 11 bp, Artificial Sequence
  synthetic circulating small noncoding RNA (sncRNA) 5' transfer RNA (tRNA) half
cacgtcggggt

SEQ ID NO: 23192 - DNA, 10 bp, Artificial Sequence
  synthetic circulating small noncoding RNA (sncRNA) 5' transfer RNA (tRNA) half
cccgacgtga

SEQ ID NO: 23193 - DNA, 33 bp, Artificial Sequence
  synthetic circulating small noncoding RNA (sncRNA) 5' transfer RNA (tRNA) half
cccggatagctcagtcggtagagcatcagactt

SEQ ID NO: 23194 - DNA, 33 bp, Artificial Sequence
  synthetic circulating small noncoding RNA (sncRNA) 5' transfer RNA (tRNA) half
gtcccatgctctaccgactgagctagccgggca

SEQ ID NO: 23195 - DNA, 18 bp, Artificial Sequence
  synthetic circulating small noncoding RNA (sncRNA) 5' transfer RNA (tRNA) half
tcgcgacccctggtttac

SEQ ID NO: 23196 - DNA, 22 bp, Artificial Sequence
  synthetic circulating small noncoding RNA (sncRNA) 5' transfer RNA (tRNA) half
aaaacttgggctcgtccgggat

SEQ ID NO: 23197 - DNA, 24 bp, Artificial Sequence
  synthetic circulating small noncoding RNA (sncRNA) 5' transfer RNA (tRNA) half
ccgacgaggatgggattcgaaccc

SEQ ID NO: 23198 - DNA, 16 bp, Artificial Sequence
  synthetic circulating small noncoding RNA (sncRNA) 5' transfer RNA (tRNA) half
ggcctcgtggcgcaac

SEQ ID NO: 23199 - DNA, 44 bp, Artificial Sequence
  synthetic circulating small noncoding RNA (sncRNA) 5' transfer RNA (tRNA) half
gtcggcaggattcgaacctgcgcggggaaaccccaatggatttc

SEQ ID NO: 23200 - DNA, 23 bp, Artificial Sequence
  synthetic circulating small noncoding RNA (sncRNA) 5' transfer RNA (tRNA) half
gagatttgaactcggatcgctgg

SEQ ID NO: 23201 - DNA, 21 bp, Artificial Sequence
  synthetic circulating small noncoding RNA (sncRNA) 5' transfer RNA (tRNA) half
aatcccggacgagccctgctt

SEQ ID NO: 23202 - DNA, 29 bp, Artificial Sequence
  synthetic circulating small noncoding RNA (sncRNA) 5' transfer RNA (tRNA) half
gctggcccgtacggggatcgaacccgcga

SEQ ID NO: 23203 - DNA, 32 bp, Artificial Sequence
  synthetic circulating small noncoding RNA (sncRNA) 5' transfer RNA (tRNA) half
tcagaagattgagggttcgaatcccttcgtgg

SEQ ID NO: 23204 - DNA, 32 bp, Artificial Sequence
  synthetic circulating small noncoding RNA (sncRNA) 5' transfer RNA (tRNA) half
gagaccggggttcgattccccgacggggagtc

SEQ ID NO: 23205 - DNA, 28 bp, Artificial Sequence
  synthetic circulating small noncoding RNA (sncRNA) 5' transfer RNA (tRNA) half
cgagaattctaccattgaaccaccaatg

SEQ ID NO: 23206 - DNA, 37 bp, Artificial Sequence
  synthetic circulating small noncoding RNA (sncRNA) 5' transfer RNA (tRNA) half
gcgagaggtcccgggttcaaatcccggacgagccctg

SEQ ID NO: 23207 - DNA, 14 bp, Artificial Sequence
  synthetic circulating small noncoding RNA (sncRNA) 5' transfer RNA (tRNA) half
tctcatgctctacc

SEQ ID NO: 23208 - DNA, 27 bp, Artificial Sequence
  synthetic circulating small noncoding RNA (sncRNA) 5' transfer RNA (tRNA) half
aggcggcccgggttcgactcccggtgt

SEQ ID NO: 23209 - DNA, 30 bp, Artificial Sequence
  synthetic circulating small noncoding RNA (sncRNA) 5' transfer RNA (tRNA) half
cgctgcgttggccgggaatcgaacccgggt

SEQ ID NO: 23210 - DNA, 13 bp, Artificial Sequence
  synthetic circulating small noncoding RNA (sncRNA) 5' transfer RNA (tRNA) half
gtgataaccgcta

SEQ ID NO: 23211 - DNA, 32 bp, Artificial Sequence
  synthetic circulating small noncoding RNA (sncRNA) 5' transfer RNA (tRNA) half
cgtcggggaatcgaaccccggtctcccgcgtg

SEQ ID NO: 23212 - DNA, 15 bp, Artificial Sequence
  synthetic circulating small noncoding RNA (sncRNA) 5' transfer RNA (tRNA) half
cgcagcaacctcggt

SEQ ID NO: 23213 - DNA, 8 bp, Artificial Sequence
  synthetic circulating small noncoding RNA (sncRNA) 5' transfer RNA (tRNA) half
cgaggccg

SEQ ID NO: 23214 - DNA, 33 bp, Artificial Sequence
  synthetic circulating small noncoding RNA (sncRNA) 5' transfer RNA (tRNA) half
cgcgggagaccggggttcgattccccgacgggg

SEQ ID NO: 23215 - DNA, 24 bp, Artificial Sequence
  synthetic circulating small noncoding RNA (sncRNA) 5' transfer RNA (tRNA) half
aatgccgtgactcggattcgaacc

SEQ ID NO: 23216 - DNA, 20 bp, Artificial Sequence
  synthetic circulating small noncoding RNA (sncRNA) 5' transfer RNA (tRNA) half
tgataaccactacactacgg

SEQ ID NO: 23217 - DNA, 15 bp, Artificial Sequence
  synthetic circulating small noncoding RNA (sncRNA) 5' transfer RNA (tRNA) half
ttcccggccaatgca

SEQ ID NO: 23218 - DNA, 13 bp, Artificial Sequence
  synthetic circulating small noncoding RNA (sncRNA) 5' transfer RNA (tRNA) half
accaacgcaggtt

SEQ ID NO: 23219 - DNA, 20 bp, Artificial Sequence
  synthetic circulating small noncoding RNA (sncRNA) 5' transfer RNA (tRNA) half
gattcccattcttgcgaccc

SEQ ID NO: 23220 - DNA, 34 bp, Artificial Sequence
  synthetic circulating small noncoding RNA (sncRNA) 5' transfer RNA (tRNA) half
cgtcgagccagccaggagtcgaacctagaatctt

SEQ ID NO: 23221 - DNA, 18 bp, Artificial Sequence
  synthetic circulating small noncoding RNA (sncRNA) 5' transfer RNA (tRNA) half
tccagcgatccgagttca

SEQ ID NO: 23222 - DNA, 20 bp, Artificial Sequence
  synthetic circulating small noncoding RNA (sncRNA) 5' transfer RNA (tRNA) half
aaaccagggctcgtccggga

SEQ ID NO: 23223 - DNA, 32 bp, Artificial Sequence
  synthetic circulating small noncoding RNA (sncRNA) 5' transfer RNA (tRNA) half
agaagattccaggttcgactcctggctggctc

SEQ ID NO: 23224 - DNA, 30 bp, Artificial Sequence
  synthetic circulating small noncoding RNA (sncRNA) 5' transfer RNA (tRNA) half
agatagcagaggatggtttcgatccatcga

SEQ ID NO: 23225 - DNA, 17 bp, Artificial Sequence
  synthetic circulating small noncoding RNA (sncRNA) 5' transfer RNA (tRNA) half
aggggtatgattctcgg

SEQ ID NO: 23226 - DNA, 15 bp, Artificial Sequence
  synthetic circulating small noncoding RNA (sncRNA) 5' transfer RNA (tRNA) half
taccgactgagctag

SEQ ID NO: 23227 - DNA, 35 bp, Artificial Sequence
  synthetic circulating small noncoding RNA (sncRNA) 5' transfer RNA (tRNA) half
gtctcatgctctaccgactgagctagccgggcgct

SEQ ID NO: 23228 - DNA, 22 bp, Artificial Sequence
  synthetic circulating small noncoding RNA (sncRNA) 5' transfer RNA (tRNA) half
agcctccctggtggtctagtgg

SEQ ID NO: 23229 - DNA, 17 bp, Artificial Sequence
  synthetic circulating small noncoding RNA (sncRNA) 5' transfer RNA (tRNA) half
aactgagctaaccggcc

SEQ ID NO: 23230 - DNA, 26 bp, Artificial Sequence
  synthetic circulating small noncoding RNA (sncRNA) 5' transfer RNA (tRNA) half
gcgtggcaggcgagaattctaccact

SEQ ID NO: 23231 - DNA, 10 bp, Artificial Sequence
  synthetic circulating small noncoding RNA (sncRNA) 5' transfer RNA (tRNA) half
ttcgatcccg

SEQ ID NO: 23232 - DNA, 37 bp, Artificial Sequence
  synthetic circulating small noncoding RNA (sncRNA) 5' transfer RNA (tRNA) half
ggtgcgagaggtcccgggttcaaatcccggacgagcc

SEQ ID NO: 23233 - DNA, 22 bp, Artificial Sequence
  synthetic circulating small noncoding RNA (sncRNA) 5' transfer RNA (tRNA) half
ttcaatccccggcatctccaac

SEQ ID NO: 23234 - DNA, 15 bp, Artificial Sequence
  synthetic circulating small noncoding RNA (sncRNA) 5' transfer RNA (tRNA) half
accgggagtcgaacc

SEQ ID NO: 23235 - DNA, 15 bp, Artificial Sequence
  synthetic circulating small noncoding RNA (sncRNA) 5' transfer RNA (tRNA) half
gaaccgaggacctct

SEQ ID NO: 23236 - DNA, 28 bp, Artificial Sequence
  synthetic circulating small noncoding RNA (sncRNA) 5' transfer RNA (tRNA) half
aacccgcgaccttggcgttattagcacc

SEQ ID NO: 23237 - DNA, 32 bp, Artificial Sequence
  synthetic circulating small noncoding RNA (sncRNA) 5' transfer RNA (tRNA) half
caaggtcgcgggttcgatccccgtacgggcca

SEQ ID NO: 23238 - DNA, 30 bp, Artificial Sequence
  synthetic circulating small noncoding RNA (sncRNA) 5' transfer RNA (tRNA) half
gtgtggcccgtacggggatcgaacccgcga

SEQ ID NO: 23239 - DNA, 11 bp, Artificial Sequence
  synthetic circulating small noncoding RNA (sncRNA) 5' transfer RNA (tRNA) half
gcctgtcacgc

SEQ ID NO: 23240 - DNA, 25 bp, Artificial Sequence
  synthetic circulating small noncoding RNA (sncRNA) 5' transfer RNA (tRNA) half
gtgacaggcggggatactcaccact

SEQ ID NO: 23241 - DNA, 25 bp, Artificial Sequence
  synthetic circulating small noncoding RNA (sncRNA) 5' transfer RNA (tRNA) half
attaagagtctcatgctctaccgac

SEQ ID NO: 23242 - DNA, 38 bp, Artificial Sequence
  synthetic circulating small noncoding RNA (sncRNA) 5' transfer RNA (tRNA) half
gaccacgaagggactcgaacccccaatcttctgatccg

SEQ ID NO: 23243 - DNA, 25 bp, Artificial Sequence
  synthetic circulating small noncoding RNA (sncRNA) 5' transfer RNA (tRNA) half
gtggcagcggtgggattcgaaccca

SEQ ID NO: 23244 - DNA, 10 bp, Artificial Sequence
  synthetic circulating small noncoding RNA (sncRNA) 5' transfer RNA (tRNA) half
cccccgaccg

SEQ ID NO: 23245 - DNA, 11 bp, Artificial Sequence
  synthetic circulating small noncoding RNA (sncRNA) 5' transfer RNA (tRNA) half
tcccacaccgg

SEQ ID NO: 23246 - DNA, 13 bp, Artificial Sequence
  synthetic circulating small noncoding RNA (sncRNA) 5' transfer RNA (tRNA) half
gccttatccatta

SEQ ID NO: 23247 - DNA, 16 bp, Artificial Sequence
  synthetic circulating small noncoding RNA (sncRNA) 5' transfer RNA (tRNA) half
tggataaggcattggc

SEQ ID NO: 23248 - DNA, 43 bp, Artificial Sequence
  synthetic circulating small noncoding RNA (sncRNA) 5' transfer RNA (tRNA) half
gctgcgttggccgggaatcgaacccgggtcaactgcttggaag

SEQ ID NO: 23249 - DNA, 12 bp, Artificial Sequence
  synthetic circulating small noncoding RNA (sncRNA) 5' transfer RNA (tRNA) half
caagactcgaac

SEQ ID NO: 23250 - DNA, 33 bp, Artificial Sequence
  synthetic circulating small noncoding RNA (sncRNA) 5' transfer RNA (tRNA) half
ggctcgttggtctaggggtatgattctcgctta

SEQ ID NO: 23251 - DNA, 39 bp, Artificial Sequence
  synthetic circulating small noncoding RNA (sncRNA) 5' transfer RNA (tRNA) half
tgggtgggctcgaaccaccaacctttcggttaacagccg

SEQ ID NO: 23252 - DNA, 20 bp, Artificial Sequence
  synthetic circulating small noncoding RNA (sncRNA) 5' transfer RNA (tRNA) half
caaatcccggacgagcccaa

SEQ ID NO: 23253 - DNA, 44 bp, Artificial Sequence
  synthetic circulating small noncoding RNA (sncRNA) 5' transfer RNA (tRNA) half
attggggtttccccgcgcaggttcgaatcctgccgactacgtga

SEQ ID NO: 23254 - DNA, 24 bp, Artificial Sequence
  synthetic circulating small noncoding RNA (sncRNA) 5' transfer RNA (tRNA) half
gtttccgtagtgtagtggtcatca

SEQ ID NO: 23255 - DNA, 18 bp, Artificial Sequence
  synthetic circulating small noncoding RNA (sncRNA) 5' transfer RNA (tRNA) half
taaatgccgtgactcgga

SEQ ID NO: 23256 - DNA, 27 bp, Artificial Sequence
  synthetic circulating small noncoding RNA (sncRNA) 5' transfer RNA (tRNA) half
accgaccacgaagggactcgaaccctc

SEQ ID NO: 23257 - DNA, 40 bp, Artificial Sequence
  synthetic circulating small noncoding RNA (sncRNA) 5' transfer RNA (tRNA) half
cccattcttgcgacccgggttcgattcccgggcggcgcat

SEQ ID NO: 23258 - DNA, 30 bp, Artificial Sequence
  synthetic circulating small noncoding RNA (sncRNA) 5' transfer RNA (tRNA) half
tgtgaggcgaacgtgataaccactacacta

SEQ ID NO: 23259 - DNA, 31 bp, Artificial Sequence
  synthetic circulating small noncoding RNA (sncRNA) 5' transfer RNA (tRNA) half
gccccatggtgtaatggttagcactctggac

SEQ ID NO: 23260 - DNA, 38 bp, Artificial Sequence
  synthetic circulating small noncoding RNA (sncRNA) 5' transfer RNA (tRNA) half
cttcgggggcgtgggttcgaatcccaccactgccaaca

SEQ ID NO: 23261 - DNA, 27 bp, Artificial Sequence
  synthetic circulating small noncoding RNA (sncRNA) 5' transfer RNA (tRNA) half
ggcaggattcgaacctgcgcggggaaa

SEQ ID NO: 23262 - DNA, 32 bp, Artificial Sequence
  synthetic circulating small noncoding RNA (sncRNA) 5' transfer RNA (tRNA) half
ctcccacatggtctagcggttaggattcctgg

SEQ ID NO: 23263 - DNA, 34 bp, Artificial Sequence
  synthetic circulating small noncoding RNA (sncRNA) 5' transfer RNA (tRNA) half
gtccccgggtgggctcgaaccaccaacctttcgg

SEQ ID NO: 23264 - DNA, 33 bp, Artificial Sequence
  synthetic circulating small noncoding RNA (sncRNA) 5' transfer RNA (tRNA) half
gttagcactctggactctgaatccagcgatccg

SEQ ID NO: 23265 - DNA, 14 bp, Artificial Sequence
  synthetic circulating small noncoding RNA (sncRNA) 5' transfer RNA (tRNA) half
ggttcgactcctgt

SEQ ID NO: 23266 - DNA, 29 bp, Artificial Sequence
  synthetic circulating small noncoding RNA (sncRNA) 5' transfer RNA (tRNA) half
tcagaagattgagggttcgagtcccttcg

SEQ ID NO: 23267 - DNA, 16 bp, Artificial Sequence
  synthetic circulating small noncoding RNA (sncRNA) 5' transfer RNA (tRNA) half
acgacgaaggtgggat

SEQ ID NO: 23268 - DNA, 18 bp, Artificial Sequence
  synthetic circulating small noncoding RNA (sncRNA) 5' transfer RNA (tRNA) half
tggtctggggtgcaggct

SEQ ID NO: 23269 - DNA, 32 bp, Artificial Sequence
  synthetic circulating small noncoding RNA (sncRNA) 5' transfer RNA (tRNA) half
gactctggtgggattcgaacccacaacctttg

SEQ ID NO: 23270 - DNA, 14 bp, Artificial Sequence
  synthetic circulating small noncoding RNA (sncRNA) 5' transfer RNA (tRNA) half
tcctcgttagtata

SEQ ID NO: 23271 - DNA, 11 bp, Artificial Sequence
  synthetic circulating small noncoding RNA (sncRNA) 5' transfer RNA (tRNA) half
gggggtgtagc

SEQ ID NO: 23272 - DNA, 33 bp, Artificial Sequence
  synthetic circulating small noncoding RNA (sncRNA) 5' transfer RNA (tRNA) half
tctgaaggtcctgagttcgaacctcagaggggg

SEQ ID NO: 23273 - DNA, 10 bp, Artificial Sequence
  synthetic circulating small noncoding RNA (sncRNA) 5' transfer RNA (tRNA) half
gggtttcggc

SEQ ID NO: 23274 - DNA, 20 bp, Artificial Sequence
  synthetic circulating small noncoding RNA (sncRNA) 5' transfer RNA (tRNA) half
tgaccccgacgtgatttgaa

SEQ ID NO: 23275 - DNA, 44 bp, Artificial Sequence
  synthetic circulating small noncoding RNA (sncRNA) 5' transfer RNA (tRNA) half
cagtcggtagagcatgagactcttaatctcagggtcgtgggttc

SEQ ID NO: 23276 - DNA, 29 bp, Artificial Sequence
  synthetic circulating small noncoding RNA (sncRNA) 5' transfer RNA (tRNA) half
ttccatggtgtaatggttagcactctgga

SEQ ID NO: 23277 - DNA, 25 bp, Artificial Sequence
  synthetic circulating small noncoding RNA (sncRNA) 5' transfer RNA (tRNA) half
gggtatagctcaggggtagagcatt

SEQ ID NO: 23278 - DNA, 11 bp, Artificial Sequence
  synthetic circulating small noncoding RNA (sncRNA) 5' transfer RNA (tRNA) half
cgggtttcggc

SEQ ID NO: 23279 - DNA, 14 bp, Artificial Sequence
  synthetic circulating small noncoding RNA (sncRNA) 5' transfer RNA (tRNA) half
ctcatgctctaccg

SEQ ID NO: 23280 - DNA, 16 bp, Artificial Sequence
  synthetic circulating small noncoding RNA (sncRNA) 5' transfer RNA (tRNA) half
ctgccacgcgggaggc

SEQ ID NO: 23281 - DNA, 14 bp, Artificial Sequence
  synthetic circulating small noncoding RNA (sncRNA) 5' transfer RNA (tRNA) half
cgaatcctgccgac

SEQ ID NO: 23282 - DNA, 14 bp, Artificial Sequence
  synthetic circulating small noncoding RNA (sncRNA) 5' transfer RNA (tRNA) half
cagaggtcgatgga

SEQ ID NO: 23283 - DNA, 18 bp, Artificial Sequence
  synthetic circulating small noncoding RNA (sncRNA) 5' transfer RNA (tRNA) half
acccacgcctccagggga

SEQ ID NO: 23284 - DNA, 11 bp, Artificial Sequence
  synthetic circulating small noncoding RNA (sncRNA) 5' transfer RNA (tRNA) half
gggtttcggca

SEQ ID NO: 23285 - DNA, 21 bp, Artificial Sequence
  synthetic circulating small noncoding RNA (sncRNA) 5' transfer RNA (tRNA) half
ataggccccatggtgtaatgg

SEQ ID NO: 23286 - DNA, 9 bp, Artificial Sequence
  synthetic circulating small noncoding RNA (sncRNA) 5' transfer RNA (tRNA) half
gttggccgg

SEQ ID NO: 23287 - DNA, 16 bp, Artificial Sequence
  synthetic circulating small noncoding RNA (sncRNA) 5' transfer RNA (tRNA) half
cgaatccggctcgaag

SEQ ID NO: 23288 - DNA, 12 bp, Artificial Sequence
  synthetic circulating small noncoding RNA (sncRNA) 5' transfer RNA (tRNA) half
ggttcgactccc

SEQ ID NO: 23289 - DNA, 15 bp, Artificial Sequence
  synthetic circulating small noncoding RNA (sncRNA) 5' transfer RNA (tRNA) half
gttaggattcggtgc

SEQ ID NO: 23290 - DNA, 10 bp, Artificial Sequence
  synthetic circulating small noncoding RNA (sncRNA) 5' transfer RNA (tRNA) half
tcgagtcccg

SEQ ID NO: 23291 - DNA, 21 bp, Artificial Sequence
  synthetic circulating small noncoding RNA (sncRNA) 5' transfer RNA (tRNA) half
ttcaaatctcgctggggcctg

SEQ ID NO: 23292 - DNA, 45 bp, Artificial Sequence
  synthetic circulating small noncoding RNA (sncRNA) 5' transfer RNA (tRNA) half
acgaggatgggattcgaacccatgcgtgcagagcacaatggatta

SEQ ID NO: 23293 - DNA, 15 bp, Artificial Sequence
  synthetic circulating small noncoding RNA (sncRNA) 5' transfer RNA (tRNA) half
actcggccacgacta

SEQ ID NO: 23294 - DNA, 22 bp, Artificial Sequence
  synthetic circulating small noncoding RNA (sncRNA) 5' transfer RNA (tRNA) half
tgtagtggtcatcacgctcgcc

SEQ ID NO: 23295 - DNA, 28 bp, Artificial Sequence
  synthetic circulating small noncoding RNA (sncRNA) 5' transfer RNA (tRNA) half
tcacccgcgtgggaggcgagaattctac

SEQ ID NO: 23296 - DNA, 21 bp, Artificial Sequence
  synthetic circulating small noncoding RNA (sncRNA) 5' transfer RNA (tRNA) half
agagcggaggactgtagctaa

SEQ ID NO: 23297 - DNA, 21 bp, Artificial Sequence
  synthetic circulating small noncoding RNA (sncRNA) 5' transfer RNA (tRNA) half
agtaccgcgcgctaaccgatt

SEQ ID NO: 23298 - DNA, 18 bp, Artificial Sequence
  synthetic circulating small noncoding RNA (sncRNA) 5' transfer RNA (tRNA) half
cacgctctaaccaactga

SEQ ID NO: 23299 - DNA, 23 bp, Artificial Sequence
  synthetic circulating small noncoding RNA (sncRNA) 5' transfer RNA (tRNA) half
acctgcgcggggaaaccccaatg

SEQ ID NO: 23300 - DNA, 27 bp, Artificial Sequence
  synthetic circulating small noncoding RNA (sncRNA) 5' transfer RNA (tRNA) half
tagctcagtcggtagagcatgagactc

SEQ ID NO: 23301 - DNA, 35 bp, Artificial Sequence
  synthetic circulating small noncoding RNA (sncRNA) 5' transfer RNA (tRNA) half
gtgtttctgtagtgtagtggttatcacgctcgcct

SEQ ID NO: 23302 - DNA, 19 bp, Artificial Sequence
  synthetic circulating small noncoding RNA (sncRNA) 5' transfer RNA (tRNA) half
aatcccggacgagccctgt

SEQ ID NO: 23303 - DNA, 20 bp, Artificial Sequence
  synthetic circulating small noncoding RNA (sncRNA) 5' transfer RNA (tRNA) half
gtgaggcgaacgtgataacc

SEQ ID NO: 23304 - DNA, 19 bp, Artificial Sequence
  synthetic circulating small noncoding RNA (sncRNA) 5' transfer RNA (tRNA) half
gctgaccccgacgtgattt

SEQ ID NO: 23305 - DNA, 31 bp, Artificial Sequence
  synthetic circulating small noncoding RNA (sncRNA) 5' transfer RNA (tRNA) half
gagatttgaactcggatcgctggattcagag

SEQ ID NO: 23306 - DNA, 10 bp, Artificial Sequence
  synthetic circulating small noncoding RNA (sncRNA) 5' transfer RNA (tRNA) half
aaccggggac

SEQ ID NO: 23307 - DNA, 15 bp, Artificial Sequence
  synthetic circulating small noncoding RNA (sncRNA) 5' transfer RNA (tRNA) half
acccgggatcgaacc

SEQ ID NO: 23308 - DNA, 12 bp, Artificial Sequence
  synthetic circulating small noncoding RNA (sncRNA) 5' transfer RNA (tRNA) half
cggtctcccgcg

SEQ ID NO: 23309 - DNA, 17 bp, Artificial Sequence
  synthetic circulating small noncoding RNA (sncRNA) 5' transfer RNA (tRNA) half
gcgagcgctctaccatt

SEQ ID NO: 23310 - DNA, 14 bp, Artificial Sequence
  synthetic circulating small noncoding RNA (sncRNA) 5' transfer RNA (tRNA) half
gagctatccgggct

SEQ ID NO: 23311 - DNA, 15 bp, Artificial Sequence
  synthetic circulating small noncoding RNA (sncRNA) 5' transfer RNA (tRNA) half
cccggatagctcagt

SEQ ID NO: 23312 - DNA, 33 bp, Artificial Sequence
  synthetic circulating small noncoding RNA (sncRNA) 5' transfer RNA (tRNA) half
ttcgggggcgtgggttcgaatcccaccgctgcc

SEQ ID NO: 23313 - DNA, 31 bp, Artificial Sequence
  synthetic circulating small noncoding RNA (sncRNA) 5' transfer RNA (tRNA) half
aggcaagaattctaccactgaaccaccaatg

SEQ ID NO: 23314 - DNA, 14 bp, Artificial Sequence
  synthetic circulating small noncoding RNA (sncRNA) 5' transfer RNA (tRNA) half
ggaggcccgggttc

SEQ ID NO: 23315 - DNA, 36 bp, Artificial Sequence
  synthetic circulating small noncoding RNA (sncRNA) 5' transfer RNA (tRNA) half
ccacgctctaaccaactgagctaaccggccagacct

SEQ ID NO: 23316 - DNA, 16 bp, Artificial Sequence
  synthetic circulating small noncoding RNA (sncRNA) 5' transfer RNA (tRNA) half
taccgcgcgctaaccg

SEQ ID NO: 23317 - DNA, 21 bp, Artificial Sequence
  synthetic circulating small noncoding RNA (sncRNA) 5' transfer RNA (tRNA) half
aaaacaaagcctccgatagca

SEQ ID NO: 23318 - DNA, 40 bp, Artificial Sequence
  synthetic circulating small noncoding RNA (sncRNA) 5' transfer RNA (tRNA) half
aggcgtccctgggtgggctcgaaccaccaacctttcggtt

SEQ ID NO: 23319 - DNA, 25 bp, Artificial Sequence
  synthetic circulating small noncoding RNA (sncRNA) 5' transfer RNA (tRNA) half
atgaccccgacgtgattcgaacacg

SEQ ID NO: 23320 - DNA, 19 bp, Artificial Sequence
  synthetic circulating small noncoding RNA (sncRNA) 5' transfer RNA (tRNA) half
aaccgggcggaaacagtac

SEQ ID NO: 23321 - DNA, 35 bp, Artificial Sequence
  synthetic circulating small noncoding RNA (sncRNA) 5' transfer RNA (tRNA) half
tagtgccgagactcggattcgaaccgaggttgctg

SEQ ID NO: 23322 - DNA, 14 bp, Artificial Sequence
  synthetic circulating small noncoding RNA (sncRNA) 5' transfer RNA (tRNA) half
cgaaccagcgacct

SEQ ID NO: 23323 - DNA, 20 bp, Artificial Sequence
  synthetic circulating small noncoding RNA (sncRNA) 5' transfer RNA (tRNA) half
aaaaactgggctcgtccggg

SEQ ID NO: 23324 - DNA, 7 bp, Artificial Sequence
  synthetic circulating small noncoding RNA (sncRNA) 5' transfer RNA (tRNA) half
agtcgaa

SEQ ID NO: 23325 - DNA, 25 bp, Artificial Sequence
  synthetic circulating small noncoding RNA (sncRNA) 5' transfer RNA (tRNA) half
ccgcctgtcacgcgggagaccgggg

SEQ ID NO: 23326 - DNA, 12 bp, Artificial Sequence
  synthetic circulating small noncoding RNA (sncRNA) 5' transfer RNA (tRNA) half
cccacttctgac

SEQ ID NO: 23327 - DNA, 19 bp, Artificial Sequence
  synthetic circulating small noncoding RNA (sncRNA) 5' transfer RNA (tRNA) half
tatgaccccgacgtgattc

SEQ ID NO: 23328 - DNA, 11 bp, Artificial Sequence
  synthetic circulating small noncoding RNA (sncRNA) 5' transfer RNA (tRNA) half
aacctcggttc

SEQ ID NO: 23329 - DNA, 18 bp, Artificial Sequence
  synthetic circulating small noncoding RNA (sncRNA) 5' transfer RNA (tRNA) half
gaactcgcgacccctggt

SEQ ID NO: 23330 - DNA, 31 bp, Artificial Sequence
  synthetic circulating small noncoding RNA (sncRNA) 5' transfer RNA (tRNA) half
tttgggctcgtccgggatttgaacccgggac

SEQ ID NO: 23331 - DNA, 16 bp, Artificial Sequence
  synthetic circulating small noncoding RNA (sncRNA) 5' transfer RNA (tRNA) half
cccggacgagcccaat

SEQ ID NO: 23332 - DNA, 18 bp, Artificial Sequence
  synthetic circulating small noncoding RNA (sncRNA) 5' transfer RNA (tRNA) half
ccggatagctcagtcggt

SEQ ID NO: 23333 - DNA, 43 bp, Artificial Sequence
  synthetic circulating small noncoding RNA (sncRNA) 5' transfer RNA (tRNA) half
tgaccgggaatcgaacccgggccgcggcggtgagagcgccgaa

SEQ ID NO: 23334 - DNA, 19 bp, Artificial Sequence
  synthetic circulating small noncoding RNA (sncRNA) 5' transfer RNA (tRNA) half
tgggctcgaaccaccaacc

SEQ ID NO: 23335 - DNA, 18 bp, Artificial Sequence
  synthetic circulating small noncoding RNA (sncRNA) 5' transfer RNA (tRNA) half
cggtctaaggcgctgcgt

SEQ ID NO: 23336 - DNA, 22 bp, Artificial Sequence
  synthetic circulating small noncoding RNA (sncRNA) 5' transfer RNA (tRNA) half
tttgggctcgtccgggatttga

SEQ ID NO: 23337 - DNA, 28 bp, Artificial Sequence
  synthetic circulating small noncoding RNA (sncRNA) 5' transfer RNA (tRNA) half
agccaggtaggagtcgaacctacaatct

SEQ ID NO: 23338 - DNA, 16 bp, Artificial Sequence
  synthetic circulating small noncoding RNA (sncRNA) 5' transfer RNA (tRNA) half
ggttccaccgagattt

SEQ ID NO: 23339 - DNA, 27 bp, Artificial Sequence
  synthetic circulating small noncoding RNA (sncRNA) 5' transfer RNA (tRNA) half
ggtcgcgagttcaaatctcgctggggc

SEQ ID NO: 23340 - DNA, 13 bp, Artificial Sequence
  synthetic circulating small noncoding RNA (sncRNA) 5' transfer RNA (tRNA) half
agtggggttcgaa

SEQ ID NO: 23341 - DNA, 15 bp, Artificial Sequence
  synthetic circulating small noncoding RNA (sncRNA) 5' transfer RNA (tRNA) half
ctcccgcgtggcagg

SEQ ID NO: 23342 - DNA, 27 bp, Artificial Sequence
  synthetic circulating small noncoding RNA (sncRNA) 5' transfer RNA (tRNA) half
tcgagccagccaggagtcgaacctaga

SEQ ID NO: 23343 - DNA, 8 bp, Artificial Sequence
  synthetic circulating small noncoding RNA (sncRNA) 5' transfer RNA (tRNA) half
cgacgagg

SEQ ID NO: 23344 - DNA, 20 bp, Artificial Sequence
  synthetic circulating small noncoding RNA (sncRNA) 5' transfer RNA (tRNA) half
caaccatgtttccgcccggt

SEQ ID NO: 23345 - DNA, 23 bp, Artificial Sequence
  synthetic circulating small noncoding RNA (sncRNA) 5' transfer RNA (tRNA) half
cgtgtttccgcccggtttcgaac

SEQ ID NO: 23346 - DNA, 15 bp, Artificial Sequence
  synthetic circulating small noncoding RNA (sncRNA) 5' transfer RNA (tRNA) half
gtgctctaacccctg

SEQ ID NO: 23347 - DNA, 10 bp, Artificial Sequence
  synthetic circulating small noncoding RNA (sncRNA) 5' transfer RNA (tRNA) half
gacgaggtgg

SEQ ID NO: 23348 - DNA, 23 bp, Artificial Sequence
  synthetic circulating small noncoding RNA (sncRNA) 5' transfer RNA (tRNA) half
ccgggcggaaacaagacacttgt

SEQ ID NO: 23349 - DNA, 23 bp, Artificial Sequence
  synthetic circulating small noncoding RNA (sncRNA) 5' transfer RNA (tRNA) half
tgtggcccgtacggggatcgaac

SEQ ID NO: 23350 - DNA, 35 bp, Artificial Sequence
  synthetic circulating small noncoding RNA (sncRNA) 5' transfer RNA (tRNA) half
cacgcgaaaggtccccggttcgaaaccgggcggaa

SEQ ID NO: 23351 - DNA, 27 bp, Artificial Sequence
  synthetic circulating small noncoding RNA (sncRNA) 5' transfer RNA (tRNA) half
cgggttcgactcccggtgtgggaacgc

SEQ ID NO: 23352 - DNA, 21 bp, Artificial Sequence
  synthetic circulating small noncoding RNA (sncRNA) 5' transfer RNA (tRNA) half
tcgaatcctgccgactacgtc

SEQ ID NO: 23353 - DNA, 6 bp, Artificial Sequence
  synthetic circulating small noncoding RNA (sncRNA) 5' transfer RNA (tRNA) half
aacccg

SEQ ID NO: 23354 - DNA, 25 bp, Artificial Sequence
  synthetic circulating small noncoding RNA (sncRNA) 5' transfer RNA (tRNA) half
tagcgcccgaacagggacttgaacc

SEQ ID NO: 23355 - DNA, 24 bp, Artificial Sequence
  synthetic circulating small noncoding RNA (sncRNA) 5' transfer RNA (tRNA) half
tgaccgggaatcgaacccgggccg

SEQ ID NO: 23356 - DNA, 11 bp, Artificial Sequence
  synthetic circulating small noncoding RNA (sncRNA) 5' transfer RNA (tRNA) half
ttcgattcccg

SEQ ID NO: 23357 - DNA, 30 bp, Artificial Sequence
  synthetic circulating small noncoding RNA (sncRNA) 5' transfer RNA (tRNA) half
tggccgggaatcgaacccgggcctcccgcg

SEQ ID NO: 23358 - DNA, 19 bp, Artificial Sequence
  synthetic circulating small noncoding RNA (sncRNA) 5' transfer RNA (tRNA) half
cacgcgggaggcccgggtt

SEQ ID NO: 23359 - DNA, 21 bp, Artificial Sequence
  synthetic circulating small noncoding RNA (sncRNA) 5' transfer RNA (tRNA) half
aggcggggatactcaccacta

SEQ ID NO: 23360 - DNA, 26 bp, Artificial Sequence
  synthetic circulating small noncoding RNA (sncRNA) 5' transfer RNA (tRNA) half
gggcccagcacgcttccgctgcgcca

SEQ ID NO: 23361 - DNA, 22 bp, Artificial Sequence
  synthetic circulating small noncoding RNA (sncRNA) 5' transfer RNA (tRNA) half
ggttcgaatccgagtcacggca

SEQ ID NO: 23362 - DNA, 18 bp, Artificial Sequence
  synthetic circulating small noncoding RNA (sncRNA) 5' transfer RNA (tRNA) half
ctttcaccgccgcggccc

SEQ ID NO: 23363 - DNA, 35 bp, Artificial Sequence
  synthetic circulating small noncoding RNA (sncRNA) 5' transfer RNA (tRNA) half
taccgggagtcgaacccgggccgcctgggtgaaaa

SEQ ID NO: 23364 - DNA, 37 bp, Artificial Sequence
  synthetic circulating small noncoding RNA (sncRNA) 5' transfer RNA (tRNA) half
cttgaaccctggaccctcagattaaaagtctgatgct

SEQ ID NO: 23365 - DNA, 17 bp, Artificial Sequence
  synthetic circulating small noncoding RNA (sncRNA) 5' transfer RNA (tRNA) half
cgctggttcgaatccgg

SEQ ID NO: 23366 - DNA, 14 bp, Artificial Sequence
  synthetic circulating small noncoding RNA (sncRNA) 5' transfer RNA (tRNA) half
ggggttatagctca

SEQ ID NO: 23367 - DNA, 29 bp, Artificial Sequence
  synthetic circulating small noncoding RNA (sncRNA) 5' transfer RNA (tRNA) half
aggtcccgggttcaaatcccggacgagcc

SEQ ID NO: 23368 - DNA, 22 bp, Artificial Sequence
  synthetic circulating small noncoding RNA (sncRNA) 5' transfer RNA (tRNA) half
ccttccaagcagttgacccggg

SEQ ID NO: 23369 - DNA, 19 bp, Artificial Sequence
  synthetic circulating small noncoding RNA (sncRNA) 5' transfer RNA (tRNA) half
gttatccattgcgccactg

SEQ ID NO: 23370 - DNA, 25 bp, Artificial Sequence
  synthetic circulating small noncoding RNA (sncRNA) 5' transfer RNA (tRNA) half
cggatcgctggattcagagtccaga

SEQ ID NO: 23371 - DNA, 28 bp, Artificial Sequence
  synthetic circulating small noncoding RNA (sncRNA) 5' transfer RNA (tRNA) half
attcctggttttcacccaggcggcccgg

SEQ ID NO: 23372 - DNA, 16 bp, Artificial Sequence
  synthetic circulating small noncoding RNA (sncRNA) 5' transfer RNA (tRNA) half
gcggagctccagtggc

SEQ ID NO: 23373 - DNA, 27 bp, Artificial Sequence
  synthetic circulating small noncoding RNA (sncRNA) 5' transfer RNA (tRNA) half
ttaaaagtctgatgctctaccaactga

SEQ ID NO: 23374 - DNA, 14 bp, Artificial Sequence
  synthetic circulating small noncoding RNA (sncRNA) 5' transfer RNA (tRNA) half
gggccgcctgggtg

SEQ ID NO: 23375 - DNA, 25 bp, Artificial Sequence
  synthetic circulating small noncoding RNA (sncRNA) 5' transfer RNA (tRNA) half
agtcctccgctctaccaactgagct

SEQ ID NO: 23376 - DNA, 9 bp, Artificial Sequence
  synthetic circulating small noncoding RNA (sncRNA) 5' transfer RNA (tRNA) half
caccaatgc

SEQ ID NO: 23377 - DNA, 17 bp, Artificial Sequence
  synthetic circulating small noncoding RNA (sncRNA) 5' transfer RNA (tRNA) half
aaatcccggacgagccc

SEQ ID NO: 23378 - DNA, 15 bp, Artificial Sequence
  synthetic circulating small noncoding RNA (sncRNA) 5' transfer RNA (tRNA) half
gacgcgttatccatt

SEQ ID NO: 23379 - DNA, 43 bp, Artificial Sequence
  synthetic circulating small noncoding RNA (sncRNA) 5' transfer RNA (tRNA) half
tggtggtctagtggttaggattcggcgctctcaccgccgcggc

SEQ ID NO: 23380 - DNA, 18 bp, Artificial Sequence
  synthetic circulating small noncoding RNA (sncRNA) 5' transfer RNA (tRNA) half
tcacgctcgcctcacacg

SEQ ID NO: 23381 - DNA, 13 bp, Artificial Sequence
  synthetic circulating small noncoding RNA (sncRNA) 5' transfer RNA (tRNA) half
gggagtcgaaccc

SEQ ID NO: 23382 - DNA, 33 bp, Artificial Sequence
  synthetic circulating small noncoding RNA (sncRNA) 5' transfer RNA (tRNA) half
ctaagccagggattgtgggttcgagtcccatct

SEQ ID NO: 23383 - DNA, 27 bp, Artificial Sequence
  synthetic circulating small noncoding RNA (sncRNA) 5' transfer RNA (tRNA) half
gtgtcagaagtgggattcgaacccacg

SEQ ID NO: 23384 - DNA, 28 bp, Artificial Sequence
  synthetic circulating small noncoding RNA (sncRNA) 5' transfer RNA (tRNA) half
aatgcgctatccattgcgccacggagcc

SEQ ID NO: 23385 - DNA, 31 bp, Artificial Sequence
  synthetic circulating small noncoding RNA (sncRNA) 5' transfer RNA (tRNA) half
cgcgggaggcccgggttcgattcccggccaa

SEQ ID NO: 23386 - DNA, 10 bp, Artificial Sequence
  synthetic circulating small noncoding RNA (sncRNA) 5' transfer RNA (tRNA) half
tcacgttcgc

SEQ ID NO: 23387 - DNA, 26 bp, Artificial Sequence
  synthetic circulating small noncoding RNA (sncRNA) 5' transfer RNA (tRNA) half
tgtaatggttagcactctggactctg

SEQ ID NO: 23388 - DNA, 14 bp, Artificial Sequence
  synthetic circulating small noncoding RNA (sncRNA) 5' transfer RNA (tRNA) half
cgcaattggttagc

SEQ ID NO: 23389 - DNA, 11 bp, Artificial Sequence
  synthetic circulating small noncoding RNA (sncRNA) 5' transfer RNA (tRNA) half
tgccccctctg

SEQ ID NO: 23390 - DNA, 11 bp, Artificial Sequence
  synthetic circulating small noncoding RNA (sncRNA) 5' transfer RNA (tRNA) half
gggggcacctg

SEQ ID NO: 23391 - DNA, 33 bp, Artificial Sequence
  synthetic circulating small noncoding RNA (sncRNA) 5' transfer RNA (tRNA) half
agagtctcatgctctaccgactgagctagccgg

SEQ ID NO: 23392 - DNA, 23 bp, Artificial Sequence
  synthetic circulating small noncoding RNA (sncRNA) 5' transfer RNA (tRNA) half
aaaagatggagggggcacccgga

SEQ ID NO: 23393 - DNA, 25 bp, Artificial Sequence
  synthetic circulating small noncoding RNA (sncRNA) 5' transfer RNA (tRNA) half
cggcccgggttcgactcccggtgtg

SEQ ID NO: 23394 - DNA, 24 bp, Artificial Sequence
  synthetic circulating small noncoding RNA (sncRNA) 5' transfer RNA (tRNA) half
ccttccaagcagttgacccgggtt

SEQ ID NO: 23395 - DNA, 14 bp, Artificial Sequence
  synthetic circulating small noncoding RNA (sncRNA) 5' transfer RNA (tRNA) half
cccttcgatagctc

SEQ ID NO: 23396 - DNA, 17 bp, Artificial Sequence
  synthetic circulating small noncoding RNA (sncRNA) 5' transfer RNA (tRNA) half
gtagctcagcggtagag

SEQ ID NO: 23397 - DNA, 31 bp, Artificial Sequence
  synthetic circulating small noncoding RNA (sncRNA) 5' transfer RNA (tRNA) half
cgttggccgggaatcgaacccgggtcaactg

SEQ ID NO: 23398 - DNA, 14 bp, Artificial Sequence
  synthetic circulating small noncoding RNA (sncRNA) 5' transfer RNA (tRNA) half
agagcggaggactg

SEQ ID NO: 23399 - DNA, 23 bp, Artificial Sequence
  synthetic circulating small noncoding RNA (sncRNA) 5' transfer RNA (tRNA) half
aaccctcaatcttctgatccgaa

SEQ ID NO: 23400 - DNA, 14 bp, Artificial Sequence
  synthetic circulating small noncoding RNA (sncRNA) 5' transfer RNA (tRNA) half
ctataccaccaacg

SEQ ID NO: 23401 - DNA, 15 bp, Artificial Sequence
  synthetic circulating small noncoding RNA (sncRNA) 5' transfer RNA (tRNA) half
cttcgatagctcagc

SEQ ID NO: 23402 - DNA, 31 bp, Artificial Sequence
  synthetic circulating small noncoding RNA (sncRNA) 5' transfer RNA (tRNA) half
tcagacgcgttatccattgcgccactggccc

SEQ ID NO: 23403 - DNA, 13 bp, Artificial Sequence
  synthetic circulating small noncoding RNA (sncRNA) 5' transfer RNA (tRNA) half
cccacccagggac

SEQ ID NO: 23404 - DNA, 38 bp, Artificial Sequence
  synthetic circulating small noncoding RNA (sncRNA) 5' transfer RNA (tRNA) half
cgcccgaacagggacttgaaccctggaccctcagatta

SEQ ID NO: 23405 - DNA, 15 bp, Artificial Sequence
  synthetic circulating small noncoding RNA (sncRNA) 5' transfer RNA (tRNA) half
tcccacttctgacac

SEQ ID NO: 23406 - DNA, 45 bp, Artificial Sequence
  synthetic circulating small noncoding RNA (sncRNA) 5' transfer RNA (tRNA) half
tgatcctcagtggtctggggtgcaggcttcaaacctgtagctgtt

SEQ ID NO: 23407 - DNA, 14 bp, Artificial Sequence
  synthetic circulating small noncoding RNA (sncRNA) 5' transfer RNA (tRNA) half
aacaggattcgaac

SEQ ID NO: 23408 - DNA, 23 bp, Artificial Sequence
  synthetic circulating small noncoding RNA (sncRNA) 5' transfer RNA (tRNA) half
ggtgggactcgaacccacaacct

SEQ ID NO: 23409 - DNA, 19 bp, Artificial Sequence
  synthetic circulating small noncoding RNA (sncRNA) 5' transfer RNA (tRNA) half
atcctgctcacagcgctag

SEQ ID NO: 23410 - DNA, 30 bp, Artificial Sequence
  synthetic circulating small noncoding RNA (sncRNA) 5' transfer RNA (tRNA) half
cgctgggattcgaacccaggatctcctgtt

SEQ ID NO: 23411 - DNA, 15 bp, Artificial Sequence
  synthetic circulating small noncoding RNA (sncRNA) 5' transfer RNA (tRNA) half
cgccgcggcccgggt

SEQ ID NO: 23412 - DNA, 29 bp, Artificial Sequence
  synthetic circulating small noncoding RNA (sncRNA) 5' transfer RNA (tRNA) half
agagcgccgaatcctaaccactagaccac

SEQ ID NO: 23413 - DNA, 34 bp, Artificial Sequence
  synthetic circulating small noncoding RNA (sncRNA) 5' transfer RNA (tRNA) half
aaaagtctgatgctctaccgactgagctatccgg

SEQ ID NO: 23414 - DNA, 10 bp, Artificial Sequence
  synthetic circulating small noncoding RNA (sncRNA) 5' transfer RNA (tRNA) half
gagcccccct

SEQ ID NO: 23415 - DNA, 16 bp, Artificial Sequence
  synthetic circulating small noncoding RNA (sncRNA) 5' transfer RNA (tRNA) half
aaatctcggtggaacc

SEQ ID NO: 23416 - DNA, 16 bp, Artificial Sequence
  synthetic circulating small noncoding RNA (sncRNA) 5' transfer RNA (tRNA) half
actaaccactatacta

SEQ ID NO: 23417 - DNA, 10 bp, Artificial Sequence
  synthetic circulating small noncoding RNA (sncRNA) 5' transfer RNA (tRNA) half
ggttcgaacc

SEQ ID NO: 23418 - DNA, 20 bp, Artificial Sequence
  synthetic circulating small noncoding RNA (sncRNA) 5' transfer RNA (tRNA) half
actcgaacccacaatccctg

SEQ ID NO: 23419 - DNA, 14 bp, Artificial Sequence
  synthetic circulating small noncoding RNA (sncRNA) 5' transfer RNA (tRNA) half
ccgggtcaactgct

SEQ ID NO: 23420 - DNA, 34 bp, Artificial Sequence
  synthetic circulating small noncoding RNA (sncRNA) 5' transfer RNA (tRNA) half
gaactcggatcgctggattcagagtccagagtgc

SEQ ID NO: 23421 - DNA, 38 bp, Artificial Sequence
  synthetic circulating small noncoding RNA (sncRNA) 5' transfer RNA (tRNA) half
aacaggagatcctgggttcaaatcccagcggggccttt

SEQ ID NO: 23422 - DNA, 36 bp, Artificial Sequence
  synthetic circulating small noncoding RNA (sncRNA) 5' transfer RNA (tRNA) half
tcccgcgtggcaggcgagaattctaccactgaacca

SEQ ID NO: 23423 - DNA, 13 bp, Artificial Sequence
  synthetic circulating small noncoding RNA (sncRNA) 5' transfer RNA (tRNA) half
tagtcggcaggat

SEQ ID NO: 23424 - DNA, 32 bp, Artificial Sequence
  synthetic circulating small noncoding RNA (sncRNA) 5' transfer RNA (tRNA) half
gaggtcccgggttcaaatcccggacgagcccc

SEQ ID NO: 23425 - DNA, 19 bp, Artificial Sequence
  synthetic circulating small noncoding RNA (sncRNA) 5' transfer RNA (tRNA) half
ggctcgaactcacaacctc

SEQ ID NO: 23426 - DNA, 17 bp, Artificial Sequence
  synthetic circulating small noncoding RNA (sncRNA) 5' transfer RNA (tRNA) half
gctagccattacaccat

SEQ ID NO: 23427 - DNA, 39 bp, Artificial Sequence
  synthetic circulating small noncoding RNA (sncRNA) 5' transfer RNA (tRNA) half
cgtcgagccagccaggagtcgaacctagaatcttctgat

SEQ ID NO: 23428 - DNA, 8 bp, Artificial Sequence
  synthetic circulating small noncoding RNA (sncRNA) 5' transfer RNA (tRNA) half
gtagtcgg

SEQ ID NO: 23429 - DNA, 7 bp, Artificial Sequence
  synthetic circulating small noncoding RNA (sncRNA) 5' transfer RNA (tRNA) half
acgagcc

SEQ ID NO: 23430 - DNA, 14 bp, Artificial Sequence
  synthetic circulating small noncoding RNA (sncRNA) 5' transfer RNA (tRNA) half
accactagaccacc

SEQ ID NO: 23431 - DNA, 19 bp, Artificial Sequence
  synthetic circulating small noncoding RNA (sncRNA) 5' transfer RNA (tRNA) half
aacgctgccgtccctgggt

SEQ ID NO: 23432 - DNA, 39 bp, Artificial Sequence
  synthetic circulating small noncoding RNA (sncRNA) 5' transfer RNA (tRNA) half
ggagctggggattgtgggttcgagtcccatctgggtcgc

SEQ ID NO: 23433 - DNA, 14 bp, Artificial Sequence
  synthetic circulating small noncoding RNA (sncRNA) 5' transfer RNA (tRNA) half
tagtactctgcgtt

SEQ ID NO: 23434 - DNA, 12 bp, Artificial Sequence
  synthetic circulating small noncoding RNA (sncRNA) 5' transfer RNA (tRNA) half
gtagtcggcagg

SEQ ID NO: 23435 - DNA, 17 bp, Artificial Sequence
  synthetic circulating small noncoding RNA (sncRNA) 5' transfer RNA (tRNA) half
cagcgagcagggttcga

SEQ ID NO: 23436 - DNA, 7 bp, Artificial Sequence
  synthetic circulating small noncoding RNA (sncRNA) 5' transfer RNA (tRNA) half
cgcgaaa

SEQ ID NO: 23437 - DNA, 15 bp, Artificial Sequence
  synthetic circulating small noncoding RNA (sncRNA) 5' transfer RNA (tRNA) half
gcctccgaagagact

SEQ ID NO: 23438 - DNA, 19 bp, Artificial Sequence
  synthetic circulating small noncoding RNA (sncRNA) 5' transfer RNA (tRNA) half
cgaacccgggtcaactgct

SEQ ID NO: 23439 - DNA, 33 bp, Artificial Sequence
  synthetic circulating small noncoding RNA (sncRNA) 5' transfer RNA (tRNA) half
cattggccgggaatcgaacccgggtcacccgcg

SEQ ID NO: 23440 - DNA, 13 bp, Artificial Sequence
  synthetic circulating small noncoding RNA (sncRNA) 5' transfer RNA (tRNA) half
caactctcatgtc

SEQ ID NO: 23441 - DNA, 31 bp, Artificial Sequence
  synthetic circulating small noncoding RNA (sncRNA) 5' transfer RNA (tRNA) half
aggcccgggttcgattcccggccaatgcact

SEQ ID NO: 23442 - DNA, 27 bp, Artificial Sequence
  synthetic circulating small noncoding RNA (sncRNA) 5' transfer RNA (tRNA) half
gtgatcgtataggggttagtactctgc

SEQ ID NO: 23443 - DNA, 14 bp, Artificial Sequence
  synthetic circulating small noncoding RNA (sncRNA) 5' transfer RNA (tRNA) half
tagtgtggccgagc

SEQ ID NO: 23444 - DNA, 30 bp, Artificial Sequence
  synthetic circulating small noncoding RNA (sncRNA) 5' transfer RNA (tRNA) half
cggggatcgaacccgcgaccttggcgttat

SEQ ID NO: 23445 - DNA, 6 bp, Artificial Sequence
  synthetic circulating small noncoding RNA (sncRNA) 5' transfer RNA (tRNA) half
ccggtg

SEQ ID NO: 23446 - DNA, 24 bp, Artificial Sequence
  synthetic circulating small noncoding RNA (sncRNA) 5' transfer RNA (tRNA) half
cgggacctctcgcaccctaagcga

SEQ ID NO: 23447 - DNA, 16 bp, Artificial Sequence
  synthetic circulating small noncoding RNA (sncRNA) 5' transfer RNA (tRNA) half
aaccagggacctttag

SEQ ID NO: 23448 - DNA, 18 bp, Artificial Sequence
  synthetic circulating small noncoding RNA (sncRNA) 5' transfer RNA (tRNA) half
ggaatcgaaccccggtct

SEQ ID NO: 23449 - DNA, 27 bp, Artificial Sequence
  synthetic circulating small noncoding RNA (sncRNA) 5' transfer RNA (tRNA) half
ccgggttcgactcccggtgtgggaaca

SEQ ID NO: 23450 - DNA, 34 bp, Artificial Sequence
  synthetic circulating small noncoding RNA (sncRNA) 5' transfer RNA (tRNA) half
accgaggttgctgcggccacaacgcagagtacta

SEQ ID NO: 23451 - DNA, 33 bp, Artificial Sequence
  synthetic circulating small noncoding RNA (sncRNA) 5' transfer RNA (tRNA) half
gaagatcacgggttcgaaccccgtccgtgcctg

SEQ ID NO: 23452 - DNA, 11 bp, Artificial Sequence
  synthetic circulating small noncoding RNA (sncRNA) 5' transfer RNA (tRNA) half
tacactacgga

SEQ ID NO: 23453 - DNA, 23 bp, Artificial Sequence
  synthetic circulating small noncoding RNA (sncRNA) 5' transfer RNA (tRNA) half
gcgcccgaacagggacttgaacc

SEQ ID NO: 23454 - DNA, 24 bp, Artificial Sequence
  synthetic circulating small noncoding RNA (sncRNA) 5' transfer RNA (tRNA) half
caggaccttcagattatgagactg

SEQ ID NO: 23455 - DNA, 33 bp, Artificial Sequence
  synthetic circulating small noncoding RNA (sncRNA) 5' transfer RNA (tRNA) half
tccgcccggtttcgaaccggggacctttcgcgt

SEQ ID NO: 23456 - DNA, 15 bp, Artificial Sequence
  synthetic circulating small noncoding RNA (sncRNA) 5' transfer RNA (tRNA) half
ctaccgactgagcta

SEQ ID NO: 23457 - DNA, 20 bp, Artificial Sequence
  synthetic circulating small noncoding RNA (sncRNA) 5' transfer RNA (tRNA) half
agaccgacgaggatgggatt

SEQ ID NO: 23458 - DNA, 19 bp, Artificial Sequence
  synthetic circulating small noncoding RNA (sncRNA) 5' transfer RNA (tRNA) half
gggttcgaacccacgcaga

SEQ ID NO: 23459 - DNA, 31 bp, Artificial Sequence
  synthetic circulating small noncoding RNA (sncRNA) 5' transfer RNA (tRNA) half
cccgacgtgacttgaacacgcaaccttctga

SEQ ID NO: 23460 - DNA, 22 bp, Artificial Sequence
  synthetic circulating small noncoding RNA (sncRNA) 5' transfer RNA (tRNA) half
tagtggtatgattctcagtttg

SEQ ID NO: 23461 - DNA, 15 bp, Artificial Sequence
  synthetic circulating small noncoding RNA (sncRNA) 5' transfer RNA (tRNA) half
cggaggcgtgggttc

SEQ ID NO: 23462 - DNA, 16 bp, Artificial Sequence
  synthetic circulating small noncoding RNA (sncRNA) 5' transfer RNA (tRNA) half
tcgaaccccgtccgtg

SEQ ID NO: 23463 - DNA, 23 bp, Artificial Sequence
  synthetic circulating small noncoding RNA (sncRNA) 5' transfer RNA (tRNA) half
cagattaaaagtctgatgctcta

SEQ ID NO: 23464 - DNA, 23 bp, Artificial Sequence
  synthetic circulating small noncoding RNA (sncRNA) 5' transfer RNA (tRNA) half
aactgggctcgtccgggatttga

SEQ ID NO: 23465 - DNA, 16 bp, Artificial Sequence
  synthetic circulating small noncoding RNA (sncRNA) 5' transfer RNA (tRNA) half
cgggcctcccgcgtgg

SEQ ID NO: 23466 - DNA, 8 bp, Artificial Sequence
  synthetic circulating small noncoding RNA (sncRNA) 5' transfer RNA (tRNA) half
ggttcgaa

SEQ ID NO: 23467 - DNA, 7 bp, Artificial Sequence
  synthetic circulating small noncoding RNA (sncRNA) 5' transfer RNA (tRNA) half
gtccccg

SEQ ID NO: 23468 - DNA, 11 bp, Artificial Sequence
  synthetic circulating small noncoding RNA (sncRNA) 5' transfer RNA (tRNA) half
tcgattcccgg

SEQ ID NO: 23469 - DNA, 16 bp, Artificial Sequence
  synthetic circulating small noncoding RNA (sncRNA) 5' transfer RNA (tRNA) half
ttctaccactgaacca

SEQ ID NO: 23470 - DNA, 10 bp, Artificial Sequence
  synthetic circulating small noncoding RNA (sncRNA) 5' transfer RNA (tRNA) half
tcgattccgg

SEQ ID NO: 23471 - DNA, 11 bp, Artificial Sequence
  synthetic circulating small noncoding RNA (sncRNA) 5' transfer RNA (tRNA) half
aacccacgacc

SEQ ID NO: 23472 - DNA, 33 bp, Artificial Sequence
  synthetic circulating small noncoding RNA (sncRNA) 5' transfer RNA (tRNA) half
cataacccagaggtcgatggatcgaaaccatcc

SEQ ID NO: 23473 - DNA, 12 bp, Artificial Sequence
  synthetic circulating small noncoding RNA (sncRNA) 5' transfer RNA (tRNA) half
ctgatccgaagt

SEQ ID NO: 23474 - DNA, 28 bp, Artificial Sequence
  synthetic circulating small noncoding RNA (sncRNA) 5' transfer RNA (tRNA) half
tggtggttcaatggtagaattctcgcct

SEQ ID NO: 23475 - DNA, 19 bp, Artificial Sequence
  synthetic circulating small noncoding RNA (sncRNA) 5' transfer RNA (tRNA) half
gaagcgtgctgggcccata

SEQ ID NO: 23476 - DNA, 24 bp, Artificial Sequence
  synthetic circulating small noncoding RNA (sncRNA) 5' transfer RNA (tRNA) half
tctccgtatggaggcgtgggttcg

SEQ ID NO: 23477 - DNA, 12 bp, Artificial Sequence
  synthetic circulating small noncoding RNA (sncRNA) 5' transfer RNA (tRNA) half
cccgggtcaact

SEQ ID NO: 23478 - DNA, 36 bp, Artificial Sequence
  synthetic circulating small noncoding RNA (sncRNA) 5' transfer RNA (tRNA) half
tgccctctctgaggttcgaactcaggaccttcagat

SEQ ID NO: 23479 - DNA, 18 bp, Artificial Sequence
  synthetic circulating small noncoding RNA (sncRNA) 5' transfer RNA (tRNA) half
ccagggctcgtccgggat

SEQ ID NO: 23480 - DNA, 30 bp, Artificial Sequence
  synthetic circulating small noncoding RNA (sncRNA) 5' transfer RNA (tRNA) half
gggggcgtgggttcgaatcccaccgctgcc

SEQ ID NO: 23481 - DNA, 35 bp, Artificial Sequence
  synthetic circulating small noncoding RNA (sncRNA) 5' transfer RNA (tRNA) half
cccaggcggcccgggttcgactcccggtatgggaa

SEQ ID NO: 23482 - DNA, 14 bp, Artificial Sequence
  synthetic circulating small noncoding RNA (sncRNA) 5' transfer RNA (tRNA) half
gagcgctctaccat

SEQ ID NO: 23483 - DNA, 26 bp, Artificial Sequence
  synthetic circulating small noncoding RNA (sncRNA) 5' transfer RNA (tRNA) half
gtctcatgctctacccactgagctat

SEQ ID NO: 23484 - DNA, 20 bp, Artificial Sequence
  synthetic circulating small noncoding RNA (sncRNA) 5' transfer RNA (tRNA) half
ttcgattccggctcgaagga

SEQ ID NO: 23485 - DNA, 17 bp, Artificial Sequence
  synthetic circulating small noncoding RNA (sncRNA) 5' transfer RNA (tRNA) half
gatcgaacccgcgacct

SEQ ID NO: 23486 - DNA, 23 bp, Artificial Sequence
  synthetic circulating small noncoding RNA (sncRNA) 5' transfer RNA (tRNA) half
ggtatgattctcgcttcgggtgc

SEQ ID NO: 23487 - DNA, 18 bp, Artificial Sequence
  synthetic circulating small noncoding RNA (sncRNA) 5' transfer RNA (tRNA) half
ttcgactcctggctggct

SEQ ID NO: 23488 - DNA, 31 bp, Artificial Sequence
  synthetic circulating small noncoding RNA (sncRNA) 5' transfer RNA (tRNA) half
ggccggttagctcagttggttagagtgtggt

SEQ ID NO: 23489 - DNA, 12 bp, Artificial Sequence
  synthetic circulating small noncoding RNA (sncRNA) 5' transfer RNA (tRNA) half
cccactcctgac

SEQ ID NO: 23490 - DNA, 14 bp, Artificial Sequence
  synthetic circulating small noncoding RNA (sncRNA) 5' transfer RNA (tRNA) half
acaggattcgaacc

SEQ ID NO: 23491 - DNA, 18 bp, Artificial Sequence
  synthetic circulating small noncoding RNA (sncRNA) 5' transfer RNA (tRNA) half
accgggcggaaacaagca

SEQ ID NO: 23492 - DNA, 33 bp, Artificial Sequence
  synthetic circulating small noncoding RNA (sncRNA) 5' transfer RNA (tRNA) half
gtcgactctggcgggactcgaacccgcaacctt

SEQ ID NO: 23493 - DNA, 30 bp, Artificial Sequence
  synthetic circulating small noncoding RNA (sncRNA) 5' transfer RNA (tRNA) half
ttcgatccccgtacgggccagtagggatta

SEQ ID NO: 23494 - DNA, 34 bp, Artificial Sequence
  synthetic circulating small noncoding RNA (sncRNA) 5' transfer RNA (tRNA) half
aggattcggcgctctcaccgccgcggcccgggtt

SEQ ID NO: 23495 - DNA, 35 bp, Artificial Sequence
  synthetic circulating small noncoding RNA (sncRNA) 5' transfer RNA (tRNA) half
aaccaggaatcctaaccgctagaccatgtgggaac

SEQ ID NO: 23496 - DNA, 16 bp, Artificial Sequence
  synthetic circulating small noncoding RNA (sncRNA) 5' transfer RNA (tRNA) half
ttcgagtcctgccgcg

SEQ ID NO: 23497 - DNA, 16 bp, Artificial Sequence
  synthetic circulating small noncoding RNA (sncRNA) 5' transfer RNA (tRNA) half
gaatccgagtcacggc

SEQ ID NO: 23498 - DNA, 13 bp, Artificial Sequence
  synthetic circulating small noncoding RNA (sncRNA) 5' transfer RNA (tRNA) half
cagtctcttcgga

SEQ ID NO: 23499 - DNA, 19 bp, Artificial Sequence
  synthetic circulating small noncoding RNA (sncRNA) 5' transfer RNA (tRNA) half
agagtcccatgctctaccg

SEQ ID NO: 23500 - DNA, 19 bp, Artificial Sequence
  synthetic circulating small noncoding RNA (sncRNA) 5' transfer RNA (tRNA) half
cttccgctgcgccactctg

SEQ ID NO: 23501 - DNA, 7 bp, Artificial Sequence
  synthetic circulating small noncoding RNA (sncRNA) 5' transfer RNA (tRNA) half
tagccgc

SEQ ID NO: 23502 - DNA, 9 bp, Artificial Sequence
  synthetic circulating small noncoding RNA (sncRNA) 5' transfer RNA (tRNA) half
gtccccggt

SEQ ID NO: 23503 - DNA, 39 bp, Artificial Sequence
  synthetic circulating small noncoding RNA (sncRNA) 5' transfer RNA (tRNA) half
acccaggcggcccgggttcgactcccggtatgggaacag

SEQ ID NO: 23504 - DNA, 23 bp, Artificial Sequence
  synthetic circulating small noncoding RNA (sncRNA) 5' transfer RNA (tRNA) half
aggttcgaatcctgccgactacg

SEQ ID NO: 23505 - DNA, 6 bp, Artificial Sequence
  synthetic circulating small noncoding RNA (sncRNA) 5' transfer RNA (tRNA) half
ggcccc

SEQ ID NO: 23506 - DNA, 38 bp, Artificial Sequence
  synthetic circulating small noncoding RNA (sncRNA) 5' transfer RNA (tRNA) half
ttcccattcttgcgacccgggttcgattcccgggcggc

SEQ ID NO: 23507 - DNA, 32 bp, Artificial Sequence
  synthetic circulating small noncoding RNA (sncRNA) 5' transfer RNA (tRNA) half
gcgagaattctaccactgaaccaccaatgcaa

SEQ ID NO: 23508 - DNA, 16 bp, Artificial Sequence
  synthetic circulating small noncoding RNA (sncRNA) 5' transfer RNA (tRNA) half
gaacccgggcctcccg

SEQ ID NO: 23509 - DNA, 36 bp, Artificial Sequence
  synthetic circulating small noncoding RNA (sncRNA) 5' transfer RNA (tRNA) half
ccacgcgggaggcccgggttcgattcccggcccatg

SEQ ID NO: 23510 - DNA, 22 bp, Artificial Sequence
  synthetic circulating small noncoding RNA (sncRNA) 5' transfer RNA (tRNA) half
gagagcgccgaatcctaaccac

SEQ ID NO: 23511 - DNA, 13 bp, Artificial Sequence
  synthetic circulating small noncoding RNA (sncRNA) 5' transfer RNA (tRNA) half
tccgaagagactg

SEQ ID NO: 23512 - DNA, 24 bp, Artificial Sequence
  synthetic circulating small noncoding RNA (sncRNA) 5' transfer RNA (tRNA) half
ctggactctgaatccagcgatccg

SEQ ID NO: 23513 - DNA, 35 bp, Artificial Sequence
  synthetic circulating small noncoding RNA (sncRNA) 5' transfer RNA (tRNA) half
aagcgagaatcatacccctagaccaacgagccgat

SEQ ID NO: 23514 - DNA, 14 bp, Artificial Sequence
  synthetic circulating small noncoding RNA (sncRNA) 5' transfer RNA (tRNA) half
agagtgctaaccat

SEQ ID NO: 23515 - DNA, 9 bp, Artificial Sequence
  synthetic circulating small noncoding RNA (sncRNA) 5' transfer RNA (tRNA) half
ggacgagcg

SEQ ID NO: 23516 - DNA, 21 bp, Artificial Sequence
  synthetic circulating small noncoding RNA (sncRNA) 5' transfer RNA (tRNA) half
agagtcccatgctctaccgac

SEQ ID NO: 23517 - DNA, 12 bp, Artificial Sequence
  synthetic circulating small noncoding RNA (sncRNA) 5' transfer RNA (tRNA) half
cacgactacaag

SEQ ID NO: 23518 - DNA, 19 bp, Artificial Sequence
  synthetic circulating small noncoding RNA (sncRNA) 5' transfer RNA (tRNA) half
aaccactcggccacctcgt

SEQ ID NO: 23519 - DNA, 34 bp, Artificial Sequence
  synthetic circulating small noncoding RNA (sncRNA) 5' transfer RNA (tRNA) half
tgccgaaacccgggatcgaaccagggacctttag

SEQ ID NO: 23520 - DNA, 29 bp, Artificial Sequence
  synthetic circulating small noncoding RNA (sncRNA) 5' transfer RNA (tRNA) half
cacgggttcgaaccccgtccgtgcctgcc

SEQ ID NO: 23521 - DNA, 17 bp, Artificial Sequence
  synthetic circulating small noncoding RNA (sncRNA) 5' transfer RNA (tRNA) half
gatgccggggctcgaac

SEQ ID NO: 23522 - DNA, 36 bp, Artificial Sequence
  synthetic circulating small noncoding RNA (sncRNA) 5' transfer RNA (tRNA) half
tcagtggtagaattctcgcctgccacgcgggaggcc

SEQ ID NO: 23523 - DNA, 30 bp, Artificial Sequence
  synthetic circulating small noncoding RNA (sncRNA) 5' transfer RNA (tRNA) half
gcaacctcggttcgaatccgagtcacggca

SEQ ID NO: 23524 - DNA, 40 bp, Artificial Sequence
  synthetic circulating small noncoding RNA (sncRNA) 5' transfer RNA (tRNA) half
gtctagtggttaggattcggcgctctcaccgccgcggccc

SEQ ID NO: 23525 - DNA, 14 bp, Artificial Sequence
  synthetic circulating small noncoding RNA (sncRNA) 5' transfer RNA (tRNA) half
cccggctagctcag

SEQ ID NO: 23526 - DNA, 10 bp, Artificial Sequence
  synthetic circulating small noncoding RNA (sncRNA) 5' transfer RNA (tRNA) half
gtacgggcca

SEQ ID NO: 23527 - DNA, 11 bp, Artificial Sequence
  synthetic circulating small noncoding RNA (sncRNA) 5' transfer RNA (tRNA) half
ccaccgctgcc

SEQ ID NO: 23528 - DNA, 13 bp, Artificial Sequence
  synthetic circulating small noncoding RNA (sncRNA) 5' transfer RNA (tRNA) half
agggttcgaatcc

SEQ ID NO: 23529 - DNA, 11 bp, Artificial Sequence
  synthetic circulating small noncoding RNA (sncRNA) 5' transfer RNA (tRNA) half
gagcatgagac

SEQ ID NO: 23530 - DNA, 22 bp, Artificial Sequence
  synthetic circulating small noncoding RNA (sncRNA) 5' transfer RNA (tRNA) half
gagatgccggggatcgaacccg

SEQ ID NO: 23531 - DNA, 30 bp, Artificial Sequence
  synthetic circulating small noncoding RNA (sncRNA) 5' transfer RNA (tRNA) half
tcagacgcgctaccgttgcgccacgaggcc

SEQ ID NO: 23532 - DNA, 31 bp, Artificial Sequence
  synthetic circulating small noncoding RNA (sncRNA) 5' transfer RNA (tRNA) half
atgctctaccgactgagctatccgggctctt

SEQ ID NO: 23533 - DNA, 15 bp, Artificial Sequence
  synthetic circulating small noncoding RNA (sncRNA) 5' transfer RNA (tRNA) half
ggtgagagcgccgaa

SEQ ID NO: 23534 - DNA, 10 bp, Artificial Sequence
  synthetic circulating small noncoding RNA (sncRNA) 5' transfer RNA (tRNA) half
cgaacccgcg

SEQ ID NO: 23535 - DNA, 19 bp, Artificial Sequence
  synthetic circulating small noncoding RNA (sncRNA) 5' transfer RNA (tRNA) half
acccgggacctctcgcacc

SEQ ID NO: 23536 - DNA, 20 bp, Artificial Sequence
  synthetic circulating small noncoding RNA (sncRNA) 5' transfer RNA (tRNA) half
gtttccgtagtgtagtggtc

SEQ ID NO: 23537 - DNA, 13 bp, Artificial Sequence
  synthetic circulating small noncoding RNA (sncRNA) 5' transfer RNA (tRNA) half
agcgcccgaacag

SEQ ID NO: 23538 - DNA, 22 bp, Artificial Sequence
  synthetic circulating small noncoding RNA (sncRNA) 5' transfer RNA (tRNA) half
aatcccacttctgacagaattc

SEQ ID NO: 23539 - DNA, 22 bp, Artificial Sequence
  synthetic circulating small noncoding RNA (sncRNA) 5' transfer RNA (tRNA) half
tcccgggcggcgcatgttcttt

SEQ ID NO: 23540 - DNA, 26 bp, Artificial Sequence
  synthetic circulating small noncoding RNA (sncRNA) 5' transfer RNA (tRNA) half
gtgagggggcacccggatttgaaccg

SEQ ID NO: 23541 - DNA, 21 bp, Artificial Sequence
  synthetic circulating small noncoding RNA (sncRNA) 5' transfer RNA (tRNA) half
cggatgatcctcagtggtctg

SEQ ID NO: 23542 - DNA, 15 bp, Artificial Sequence
  synthetic circulating small noncoding RNA (sncRNA) 5' transfer RNA (tRNA) half
ttatcacgttcgcct

SEQ ID NO: 23543 - DNA, 25 bp, Artificial Sequence
  synthetic circulating small noncoding RNA (sncRNA) 5' transfer RNA (tRNA) half
cgctgcgttggccgggaatcgaacc

SEQ ID NO: 23544 - DNA, 27 bp, Artificial Sequence
  synthetic circulating small noncoding RNA (sncRNA) 5' transfer RNA (tRNA) half
gcgccaaatcctaaccactagaccacc

SEQ ID NO: 23545 - DNA, 39 bp, Artificial Sequence
  synthetic circulating small noncoding RNA (sncRNA) 5' transfer RNA (tRNA) half
gcgccgaatcctaaccactagaccaccagggaaactgcc

SEQ ID NO: 23546 - DNA, 26 bp, Artificial Sequence
  synthetic circulating small noncoding RNA (sncRNA) 5' transfer RNA (tRNA) half
gtagctcagtggtagagcgcgtgctt

SEQ ID NO: 23547 - DNA, 34 bp, Artificial Sequence
  synthetic circulating small noncoding RNA (sncRNA) 5' transfer RNA (tRNA) half
aaagtctgatgctctaccgactgagctatccggg

SEQ ID NO: 23548 - DNA, 33 bp, Artificial Sequence
  synthetic circulating small noncoding RNA (sncRNA) 5' transfer RNA (tRNA) half
gcgcccaacgtggggctcgaacccacgaccctg

SEQ ID NO: 23549 - DNA, 24 bp, Artificial Sequence
  synthetic circulating small noncoding RNA (sncRNA) 5' transfer RNA (tRNA) half
gccttagaccgctcggccacgcta

SEQ ID NO: 23550 - DNA, 13 bp, Artificial Sequence
  synthetic circulating small noncoding RNA (sncRNA) 5' transfer RNA (tRNA) half
gcgctaaggaggc

SEQ ID NO: 23551 - DNA, 14 bp, Artificial Sequence
  synthetic circulating small noncoding RNA (sncRNA) 5' transfer RNA (tRNA) half
atatggtctagcgg

SEQ ID NO: 23552 - DNA, 37 bp, Artificial Sequence
  synthetic circulating small noncoding RNA (sncRNA) 5' transfer RNA (tRNA) half
agtctaacgctctcccaactgagctatttcggcggct

SEQ ID NO: 23553 - DNA, 12 bp, Artificial Sequence
  synthetic circulating small noncoding RNA (sncRNA) 5' transfer RNA (tRNA) half
ggagatgccggg

SEQ ID NO: 23554 - DNA, 21 bp, Artificial Sequence
  synthetic circulating small noncoding RNA (sncRNA) 5' transfer RNA (tRNA) half
ctcggccatcctgactacatt

SEQ ID NO: 23555 - DNA, 17 bp, Artificial Sequence
  synthetic circulating small noncoding RNA (sncRNA) 5' transfer RNA (tRNA) half
ggttggtggttcgagcc

SEQ ID NO: 23556 - DNA, 12 bp, Artificial Sequence
  synthetic circulating small noncoding RNA (sncRNA) 5' transfer RNA (tRNA) half
gtggcccgtacg

SEQ ID NO: 23557 - DNA, 19 bp, Artificial Sequence
  synthetic circulating small noncoding RNA (sncRNA) 5' transfer RNA (tRNA) half
ttcgaacctgcgcggggag

SEQ ID NO: 23558 - DNA, 32 bp, Artificial Sequence
  synthetic circulating small noncoding RNA (sncRNA) 5' transfer RNA (tRNA) half
ccgggtcaactgcttggaaggcagctatgctc

SEQ ID NO: 23559 - DNA, 30 bp, Artificial Sequence
  synthetic circulating small noncoding RNA (sncRNA) 5' transfer RNA (tRNA) half
gcccgggttcgactcccggtgtgggaacag

SEQ ID NO: 23560 - DNA, 17 bp, Artificial Sequence
  synthetic circulating small noncoding RNA (sncRNA) 5' transfer RNA (tRNA) half
cgattccccgacgggga

SEQ ID NO: 23561 - DNA, 19 bp, Artificial Sequence
  synthetic circulating small noncoding RNA (sncRNA) 5' transfer RNA (tRNA) half
ggtggtctagtggttagga

SEQ ID NO: 23562 - DNA, 15 bp, Artificial Sequence
  synthetic circulating small noncoding RNA (sncRNA) 5' transfer RNA (tRNA) half
cggggatactaacca

SEQ ID NO: 23563 - DNA, 23 bp, Artificial Sequence
  synthetic circulating small noncoding RNA (sncRNA) 5' transfer RNA (tRNA) half
ggttatcacgttcgcctcacacg

SEQ ID NO: 23564 - DNA, 21 bp, Artificial Sequence
  synthetic circulating small noncoding RNA (sncRNA) 5' transfer RNA (tRNA) half
tcggatcgctggattcagagt

SEQ ID NO: 23565 - DNA, 11 bp, Artificial Sequence
  synthetic circulating small noncoding RNA (sncRNA) 5' transfer RNA (tRNA) half
caggatggccg

SEQ ID NO: 23566 - DNA, 16 bp, Artificial Sequence
  synthetic circulating small noncoding RNA (sncRNA) 5' transfer RNA (tRNA) half
cccacgcccccgaaga

SEQ ID NO: 23567 - DNA, 30 bp, Artificial Sequence
  synthetic circulating small noncoding RNA (sncRNA) 5' transfer RNA (tRNA) half
gcgactctggtgggactcgaacccacaacc

SEQ ID NO: 23568 - DNA, 13 bp, Artificial Sequence
  synthetic circulating small noncoding RNA (sncRNA) 5' transfer RNA (tRNA) half
atcccccgaccgc

SEQ ID NO: 23569 - DNA, 20 bp, Artificial Sequence
  synthetic circulating small noncoding RNA (sncRNA) 5' transfer RNA (tRNA) half
ttcgaatcctgccgactacg

SEQ ID NO: 23570 - DNA, 28 bp, Artificial Sequence
  synthetic circulating small noncoding RNA (sncRNA) 5' transfer RNA (tRNA) half
gtaatggttagcactctggactctgaat

SEQ ID NO: 23571 - DNA, 21 bp, Artificial Sequence
  synthetic circulating small noncoding RNA (sncRNA) 5' transfer RNA (tRNA) half
gcgcccgaacagggacttgaa

SEQ ID NO: 23572 - DNA, 13 bp, Artificial Sequence
  synthetic circulating small noncoding RNA (sncRNA) 5' transfer RNA (tRNA) half
acatggtctagcg

SEQ ID NO: 23573 - DNA, 23 bp, Artificial Sequence
  synthetic circulating small noncoding RNA (sncRNA) 5' transfer RNA (tRNA) half
gtgataaccactacactacggaa

SEQ ID NO: 23574 - DNA, 34 bp, Artificial Sequence
  synthetic circulating small noncoding RNA (sncRNA) 5' transfer RNA (tRNA) half
cgcgggaggcccgggttcgattcccggcccatgc

SEQ ID NO: 23575 - DNA, 19 bp, Artificial Sequence
  synthetic circulating small noncoding RNA (sncRNA) 5' transfer RNA (tRNA) half
accggggacctcttgatct

SEQ ID NO: 23576 - DNA, 20 bp, Artificial Sequence
  synthetic circulating small noncoding RNA (sncRNA) 5' transfer RNA (tRNA) half
gggattcgaacccacaacct

SEQ ID NO: 23577 - DNA, 23 bp, Artificial Sequence
  synthetic circulating small noncoding RNA (sncRNA) 5' transfer RNA (tRNA) half
ccgattgcgccacagagaccggt

SEQ ID NO: 23578 - DNA, 35 bp, Artificial Sequence
  synthetic circulating small noncoding RNA (sncRNA) 5' transfer RNA (tRNA) half
gcggttatcacgtctgctttacacgcagaaggtcc

SEQ ID NO: 23579 - DNA, 21 bp, Artificial Sequence
  synthetic circulating small noncoding RNA (sncRNA) 5' transfer RNA (tRNA) half
acccacgcgtgcaaagcacaa

SEQ ID NO: 23580 - DNA, 37 bp, Artificial Sequence
  synthetic circulating small noncoding RNA (sncRNA) 5' transfer RNA (tRNA) half
tcagtggtagaattctcgcctgccacgcgggaggccc

SEQ ID NO: 23581 - DNA, 17 bp, Artificial Sequence
  synthetic circulating small noncoding RNA (sncRNA) 5' transfer RNA (tRNA) half
gccttagaccactcggc

SEQ ID NO: 23582 - DNA, 15 bp, Artificial Sequence
  synthetic circulating small noncoding RNA (sncRNA) 5' transfer RNA (tRNA) half
aacgcagagtactaa

SEQ ID NO: 23583 - DNA, 16 bp, Artificial Sequence
  synthetic circulating small noncoding RNA (sncRNA) 5' transfer RNA (tRNA) half
cccggcatctccacag

SEQ ID NO: 23584 - DNA, 24 bp, Artificial Sequence
  synthetic circulating small noncoding RNA (sncRNA) 5' transfer RNA (tRNA) half
gacgaggatgggattcgaacccac

SEQ ID NO: 23585 - DNA, 31 bp, Artificial Sequence
  synthetic circulating small noncoding RNA (sncRNA) 5' transfer RNA (tRNA) half
tcgtccgggatttgaacccgggacctctcgc

SEQ ID NO: 23586 - DNA, 32 bp, Artificial Sequence
  synthetic circulating small noncoding RNA (sncRNA) 5' transfer RNA (tRNA) half
ctcggatcgctggattcaaagtccagagtgct

SEQ ID NO: 23587 - DNA, 14 bp, Artificial Sequence
  synthetic circulating small noncoding RNA (sncRNA) 5' transfer RNA (tRNA) half
gcgagaggtccccg

SEQ ID NO: 23588 - DNA, 14 bp, Artificial Sequence
  synthetic circulating small noncoding RNA (sncRNA) 5' transfer RNA (tRNA) half
ggttcgaacctgcg

SEQ ID NO: 23589 - DNA, 12 bp, Artificial Sequence
  synthetic circulating small noncoding RNA (sncRNA) 5' transfer RNA (tRNA) half
ggattcgaaccc

SEQ ID NO: 23590 - DNA, 36 bp, Artificial Sequence
  synthetic circulating small noncoding RNA (sncRNA) 5' transfer RNA (tRNA) half
gccccactgggattcaaacccacgatctcctgttta

SEQ ID NO: 23591 - DNA, 16 bp, Artificial Sequence
  synthetic circulating small noncoding RNA (sncRNA) 5' transfer RNA (tRNA) half
tgggattcgaacccag

SEQ ID NO: 23592 - DNA, 33 bp, Artificial Sequence
  synthetic circulating small noncoding RNA (sncRNA) 5' transfer RNA (tRNA) half
atcagaagattccaggttcgactcctggctggc

SEQ ID NO: 23593 - DNA, 16 bp, Artificial Sequence
  synthetic circulating small noncoding RNA (sncRNA) 5' transfer RNA (tRNA) half
tcaggatggccgagtg

SEQ ID NO: 23594 - DNA, 11 bp, Artificial Sequence
  synthetic circulating small noncoding RNA (sncRNA) 5' transfer RNA (tRNA) half
acgaggatggg

SEQ ID NO: 23595 - DNA, 28 bp, Artificial Sequence
  synthetic circulating small noncoding RNA (sncRNA) 5' transfer RNA (tRNA) half
ggtggagatgccggggatcgaacccggg

SEQ ID NO: 23596 - DNA, 18 bp, Artificial Sequence
  synthetic circulating small noncoding RNA (sncRNA) 5' transfer RNA (tRNA) half
tcatctgtgttctttatt

SEQ ID NO: 23597 - DNA, 9 bp, Artificial Sequence
  synthetic circulating small noncoding RNA (sncRNA) 5' transfer RNA (tRNA) half
gcccaacgt

SEQ ID NO: 23598 - DNA, 33 bp, Artificial Sequence
  synthetic circulating small noncoding RNA (sncRNA) 5' transfer RNA (tRNA) half
aagataagcacactggcccgtacggggatcgaa

SEQ ID NO: 23599 - DNA, 10 bp, Artificial Sequence
  synthetic circulating small noncoding RNA (sncRNA) 5' transfer RNA (tRNA) half
gggggattag

SEQ ID NO: 23600 - DNA, 18 bp, Artificial Sequence
  synthetic circulating small noncoding RNA (sncRNA) 5' transfer RNA (tRNA) half
aaggttggtggttcgagc

SEQ ID NO: 23601 - DNA, 27 bp, Artificial Sequence
  synthetic circulating small noncoding RNA (sncRNA) 5' transfer RNA (tRNA) half
ataccgggagtcgaacccgggccgcct

SEQ ID NO: 23602 - DNA, 21 bp, Artificial Sequence
  synthetic circulating small noncoding RNA (sncRNA) 5' transfer RNA (tRNA) half
gagccaggtaggagtcgaacc

SEQ ID NO: 23603 - DNA, 45 bp, Artificial Sequence
  synthetic circulating small noncoding RNA (sncRNA) 5' transfer RNA (tRNA) half
gtcacgaacaggattcgaacctgtgcggggaaaccccattggatt

SEQ ID NO: 23604 - DNA, 7 bp, Artificial Sequence
  synthetic circulating small noncoding RNA (sncRNA) 5' transfer RNA (tRNA) half
tccgccg

SEQ ID NO: 23605 - DNA, 14 bp, Artificial Sequence
  synthetic circulating small noncoding RNA (sncRNA) 5' transfer RNA (tRNA) half
aatgctctacccct

SEQ ID NO: 23606 - DNA, 9 bp, Artificial Sequence
  synthetic circulating small noncoding RNA (sncRNA) 5' transfer RNA (tRNA) half
gagtcgaac

SEQ ID NO: 23607 - DNA, 21 bp, Artificial Sequence
  synthetic circulating small noncoding RNA (sncRNA) 5' transfer RNA (tRNA) half
agcagctggctcgttggtcta

SEQ ID NO: 23608 - DNA, 27 bp, Artificial Sequence
  synthetic circulating small noncoding RNA (sncRNA) 5' transfer RNA (tRNA) half
tgtagctcagtggtagagcgcgtgctt

SEQ ID NO: 23609 - DNA, 24 bp, Artificial Sequence
  synthetic circulating small noncoding RNA (sncRNA) 5' transfer RNA (tRNA) half
gggttcgagccccagtggaaccac

SEQ ID NO: 23610 - DNA, 25 bp, Artificial Sequence
  synthetic circulating small noncoding RNA (sncRNA) 5' transfer RNA (tRNA) half
agccagccaggagtcgaacctggaa

SEQ ID NO: 23611 - DNA, 14 bp, Artificial Sequence
  synthetic circulating small noncoding RNA (sncRNA) 5' transfer RNA (tRNA) half
ttcaaatcccggac

SEQ ID NO: 23612 - DNA, 29 bp, Artificial Sequence
  synthetic circulating small noncoding RNA (sncRNA) 5' transfer RNA (tRNA) half
ccatggtgtaatggttagcactctggact

SEQ ID NO: 23613 - DNA, 27 bp, Artificial Sequence
  synthetic circulating small noncoding RNA (sncRNA) 5' transfer RNA (tRNA) half
atagctcagctggtagagcggaggact

SEQ ID NO: 23614 - DNA, 33 bp, Artificial Sequence
  synthetic circulating small noncoding RNA (sncRNA) 5' transfer RNA (tRNA) half
actctggactctgaatccagcgatccgagttca

SEQ ID NO: 23615 - DNA, 14 bp, Artificial Sequence
  synthetic circulating small noncoding RNA (sncRNA) 5' transfer RNA (tRNA) half
ggagtcagacgcgc

SEQ ID NO: 23616 - DNA, 11 bp, Artificial Sequence
  synthetic circulating small noncoding RNA (sncRNA) 5' transfer RNA (tRNA) half
tggcgcccaac

SEQ ID NO: 23617 - DNA, 29 bp, Artificial Sequence
  synthetic circulating small noncoding RNA (sncRNA) 5' transfer RNA (tRNA) half
gtcaggatggccgagcggtctaaggcgct

SEQ ID NO: 23618 - DNA, 35 bp, Artificial Sequence
  synthetic circulating small noncoding RNA (sncRNA) 5' transfer RNA (tRNA) half
gcccaacgtggggctcgaacccacgaccctgggat

SEQ ID NO: 23619 - DNA, 26 bp, Artificial Sequence
  synthetic circulating small noncoding RNA (sncRNA) 5' transfer RNA (tRNA) half
gggggtgtagctcagtggtagagcgc

SEQ ID NO: 23620 - DNA, 17 bp, Artificial Sequence
  synthetic circulating small noncoding RNA (sncRNA) 5' transfer RNA (tRNA) half
agaattctcgcctgcca

SEQ ID NO: 23621 - DNA, 34 bp, Artificial Sequence
  synthetic circulating small noncoding RNA (sncRNA) 5' transfer RNA (tRNA) half
atccttaggtcgctggttcgaatccggctcgaag

SEQ ID NO: 23622 - DNA, 14 bp, Artificial Sequence
  synthetic circulating small noncoding RNA (sncRNA) 5' transfer RNA (tRNA) half
cgattccccgacgg

SEQ ID NO: 23623 - DNA, 11 bp, Artificial Sequence
  synthetic circulating small noncoding RNA (sncRNA) 5' transfer RNA (tRNA) half
tcgaatcctgc

SEQ ID NO: 23624 - DNA, 27 bp, Artificial Sequence
  synthetic circulating small noncoding RNA (sncRNA) 5' transfer RNA (tRNA) half
ccatggtgtaatggttagcactctgga

SEQ ID NO: 23625 - DNA, 22 bp, Artificial Sequence
  synthetic circulating small noncoding RNA (sncRNA) 5' transfer RNA (tRNA) half
gggagtcgaacccgggccgcct

SEQ ID NO: 23626 - DNA, 11 bp, Artificial Sequence
  synthetic circulating small noncoding RNA (sncRNA) 5' transfer RNA (tRNA) half
tccgagtcacg

SEQ ID NO: 23627 - DNA, 24 bp, Artificial Sequence
  synthetic circulating small noncoding RNA (sncRNA) 5' transfer RNA (tRNA) half
cgggaggcccgggttcgattcccg

SEQ ID NO: 23628 - DNA, 13 bp, Artificial Sequence
  synthetic circulating small noncoding RNA (sncRNA) 5' transfer RNA (tRNA) half
ggtgagagcgccg

SEQ ID NO: 23629 - DNA, 28 bp, Artificial Sequence
  synthetic circulating small noncoding RNA (sncRNA) 5' transfer RNA (tRNA) half
gtgaggcgaacgtgataaccactacact

SEQ ID NO: 23630 - DNA, 10 bp, Artificial Sequence
  synthetic circulating small noncoding RNA (sncRNA) 5' transfer RNA (tRNA) half
taggccacgc

SEQ ID NO: 23631 - DNA, 37 bp, Artificial Sequence
  synthetic circulating small noncoding RNA (sncRNA) 5' transfer RNA (tRNA) half
taagccagggattgtgggttcgagtcccacctggggt

SEQ ID NO: 23632 - DNA, 33 bp, Artificial Sequence
  synthetic circulating small noncoding RNA (sncRNA) 5' transfer RNA (tRNA) half
gcggcccgggttcgactcccggtgtgggaaact

SEQ ID NO: 23633 - DNA, 29 bp, Artificial Sequence
  synthetic circulating small noncoding RNA (sncRNA) 5' transfer RNA (tRNA) half
ttgcaggttcgagtcctgccgcggtcgac

SEQ ID NO: 23634 - DNA, 15 bp, Artificial Sequence
  synthetic circulating small noncoding RNA (sncRNA) 5' transfer RNA (tRNA) half
tgtagtggtatcatg

SEQ ID NO: 23635 - DNA, 27 bp, Artificial Sequence
  synthetic circulating small noncoding RNA (sncRNA) 5' transfer RNA (tRNA) half
cataacccagaggtcgatggatcgaaa

SEQ ID NO: 23636 - DNA, 19 bp, Artificial Sequence
  synthetic circulating small noncoding RNA (sncRNA) 5' transfer RNA (tRNA) half
ctaagccacggcgcctacg

SEQ ID NO: 23637 - DNA, 20 bp, Artificial Sequence
  synthetic circulating small noncoding RNA (sncRNA) 5' transfer RNA (tRNA) half
aaccccgtccgtgcctgcgt

SEQ ID NO: 23638 - DNA, 36 bp, Artificial Sequence
  synthetic circulating small noncoding RNA (sncRNA) 5' transfer RNA (tRNA) half
gcattggtggttcagtggtagaattctcgcctgcca

SEQ ID NO: 23639 - DNA, 19 bp, Artificial Sequence
  synthetic circulating small noncoding RNA (sncRNA) 5' transfer RNA (tRNA) half
cgttgcgccacgaggtcct

SEQ ID NO: 23640 - DNA, 8 bp, Artificial Sequence
  synthetic circulating small noncoding RNA (sncRNA) 5' transfer RNA (tRNA) half
tcgactcc

SEQ ID NO: 23641 - DNA, 30 bp, Artificial Sequence
  synthetic circulating small noncoding RNA (sncRNA) 5' transfer RNA (tRNA) half
tctggactctgaatccagcgatccgagttc

SEQ ID NO: 23642 - DNA, 12 bp, Artificial Sequence
  synthetic circulating small noncoding RNA (sncRNA) 5' transfer RNA (tRNA) half
attccggctcga

SEQ ID NO: 23643 - DNA, 18 bp, Artificial Sequence
  synthetic circulating small noncoding RNA (sncRNA) 5' transfer RNA (tRNA) half
cgaccacgaagggactcg

SEQ ID NO: 23644 - DNA, 31 bp, Artificial Sequence
  synthetic circulating small noncoding RNA (sncRNA) 5' transfer RNA (tRNA) half
tggtgtaatggttagcactctggactctgaa

SEQ ID NO: 23645 - DNA, 32 bp, Artificial Sequence
  synthetic circulating small noncoding RNA (sncRNA) 5' transfer RNA (tRNA) half
acaggagatcctgggttcgaatcccagcggtg

SEQ ID NO: 23646 - DNA, 19 bp, Artificial Sequence
  synthetic circulating small noncoding RNA (sncRNA) 5' transfer RNA (tRNA) half
acccgggccgcctgggtga

SEQ ID NO: 23647 - DNA, 14 bp, Artificial Sequence
  synthetic circulating small noncoding RNA (sncRNA) 5' transfer RNA (tRNA) half
gccagtgccttatc

SEQ ID NO: 23648 - DNA, 21 bp, Artificial Sequence
  synthetic circulating small noncoding RNA (sncRNA) 5' transfer RNA (tRNA) half
gctcgtccgggatttgaaccc

SEQ ID NO: 23649 - DNA, 26 bp, Artificial Sequence
  synthetic circulating small noncoding RNA (sncRNA) 5' transfer RNA (tRNA) half
tgggtggttcagtggtagaattctcg

SEQ ID NO: 23650 - DNA, 21 bp, Artificial Sequence
  synthetic circulating small noncoding RNA (sncRNA) 5' transfer RNA (tRNA) half
gtgtgaggcgaacgtgataac

SEQ ID NO: 23651 - DNA, 20 bp, Artificial Sequence
  synthetic circulating small noncoding RNA (sncRNA) 5' transfer RNA (tRNA) half
ggggtcgcgagttcaaatct

SEQ ID NO: 23652 - DNA, 33 bp, Artificial Sequence
  synthetic circulating small noncoding RNA (sncRNA) 5' transfer RNA (tRNA) half
agcattggtagttcaatggtagaattctcgcct

SEQ ID NO: 23653 - DNA, 15 bp, Artificial Sequence
  synthetic circulating small noncoding RNA (sncRNA) 5' transfer RNA (tRNA) half
gacaggcggggatac

SEQ ID NO: 23654 - DNA, 26 bp, Artificial Sequence
  synthetic circulating small noncoding RNA (sncRNA) 5' transfer RNA (tRNA) half
gccccgtgtgaggatcgaactcacga

SEQ ID NO: 23655 - DNA, 34 bp, Artificial Sequence
  synthetic circulating small noncoding RNA (sncRNA) 5' transfer RNA (tRNA) half
agctggctcgttggtctaggggtatgattctcgc

SEQ ID NO: 23656 - DNA, 11 bp, Artificial Sequence
  synthetic circulating small noncoding RNA (sncRNA) 5' transfer RNA (tRNA) half
ggagactgcga

SEQ ID NO: 23657 - DNA, 18 bp, Artificial Sequence
  synthetic circulating small noncoding RNA (sncRNA) 5' transfer RNA (tRNA) half
gattcccggccaacgcat

SEQ ID NO: 23658 - DNA, 16 bp, Artificial Sequence
  synthetic circulating small noncoding RNA (sncRNA) 5' transfer RNA (tRNA) half
ttcaaagtccagagtg

SEQ ID NO: 23659 - DNA, 12 bp, Artificial Sequence
  synthetic circulating small noncoding RNA (sncRNA) 5' transfer RNA (tRNA) half
agggacctcttg

SEQ ID NO: 23660 - DNA, 32 bp, Artificial Sequence
  synthetic circulating small noncoding RNA (sncRNA) 5' transfer RNA (tRNA) half
tggggattgtgggttcgagtcccatctgggtc

SEQ ID NO: 23661 - DNA, 19 bp, Artificial Sequence
  synthetic circulating small noncoding RNA (sncRNA) 5' transfer RNA (tRNA) half
cacatggtctagcggttag

SEQ ID NO: 23662 - DNA, 18 bp, Artificial Sequence
  synthetic circulating small noncoding RNA (sncRNA) 5' transfer RNA (tRNA) half
tctaaaggtccctggttc

SEQ ID NO: 23663 - DNA, 24 bp, Artificial Sequence
  synthetic circulating small noncoding RNA (sncRNA) 5' transfer RNA (tRNA) half
cgggttcgatccccggcatctcca

SEQ ID NO: 23664 - DNA, 8 bp, Artificial Sequence
  synthetic circulating small noncoding RNA (sncRNA) 5' transfer RNA (tRNA) half
caggtgag

SEQ ID NO: 23665 - DNA, 17 bp, Artificial Sequence
  synthetic circulating small noncoding RNA (sncRNA) 5' transfer RNA (tRNA) half
gggttcgattcccgggc

SEQ ID NO: 23666 - DNA, 33 bp, Artificial Sequence
  synthetic circulating small noncoding RNA (sncRNA) 5' transfer RNA (tRNA) half
taggcgaatgtgataaccactacactacggaaa

SEQ ID NO: 23667 - DNA, 30 bp, Artificial Sequence
  synthetic circulating small noncoding RNA (sncRNA) 5' transfer RNA (tRNA) half
gagaatcatacccctagaccaacgagccgc

SEQ ID NO: 23668 - DNA, 33 bp, Artificial Sequence
  synthetic circulating small noncoding RNA (sncRNA) 5' transfer RNA (tRNA) half
accgaccacgaagggactcgaaccctcaatctt

SEQ ID NO: 23669 - DNA, 28 bp, Artificial Sequence
  synthetic circulating small noncoding RNA (sncRNA) 5' transfer RNA (tRNA) half
gtcgagccagccaggagtcgaacctaga

SEQ ID NO: 23670 - DNA, 24 bp, Artificial Sequence
  synthetic circulating small noncoding RNA (sncRNA) 5' transfer RNA (tRNA) half
tgagtctggcgccttagaccactc

SEQ ID NO: 23671 - DNA, 22 bp, Artificial Sequence
  synthetic circulating small noncoding RNA (sncRNA) 5' transfer RNA (tRNA) half
aaaaagacctgtacattccgag

SEQ ID NO: 23672 - DNA, 17 bp, Artificial Sequence
  synthetic circulating small noncoding RNA (sncRNA) 5' transfer RNA (tRNA) half
atgtagtcgtggccgag

SEQ ID NO: 23673 - DNA, 29 bp, Artificial Sequence
  synthetic circulating small noncoding RNA (sncRNA) 5' transfer RNA (tRNA) half
gggggtgtagctcagtggtagagcgcatg

SEQ ID NO: 23674 - DNA, 22 bp, Artificial Sequence
  synthetic circulating small noncoding RNA (sncRNA) 5' transfer RNA (tRNA) half
gaggccccgggttcgatccccg

SEQ ID NO: 23675 - DNA, 26 bp, Artificial Sequence
  synthetic circulating small noncoding RNA (sncRNA) 5' transfer RNA (tRNA) half
tagaattctcgcctgccacgcgggag

SEQ ID NO: 23676 - DNA, 9 bp, Artificial Sequence
  synthetic circulating small noncoding RNA (sncRNA) 5' transfer RNA (tRNA) half
gacgcgtta

SEQ ID NO: 23677 - DNA, 45 bp, Artificial Sequence
  synthetic circulating small noncoding RNA (sncRNA) 5' transfer RNA (tRNA) half
acgaggatgggattcgaacccacgcgtgcaaagcacaatggatta

SEQ ID NO: 23678 - DNA, 19 bp, Artificial Sequence
  synthetic circulating small noncoding RNA (sncRNA) 5' transfer RNA (tRNA) half
cgtcggggaattgaacccc

SEQ ID NO: 23679 - DNA, 19 bp, Artificial Sequence
  synthetic circulating small noncoding RNA (sncRNA) 5' transfer RNA (tRNA) half
ggagctggggattgtgggt

SEQ ID NO: 23680 - DNA, 19 bp, Artificial Sequence
  synthetic circulating small noncoding RNA (sncRNA) 5' transfer RNA (tRNA) half
aaatcacgtcggggtcatc

SEQ ID NO: 23681 - DNA, 18 bp, Artificial Sequence
  synthetic circulating small noncoding RNA (sncRNA) 5' transfer RNA (tRNA) half
tcgagcctcacctggagc

SEQ ID NO: 23682 - DNA, 45 bp, Artificial Sequence
  synthetic circulating small noncoding RNA (sncRNA) 5' transfer RNA (tRNA) half
tccagtctcttcgggggcgtgggttcgaatcccaccgctgccaac

SEQ ID NO: 23683 - DNA, 12 bp, Artificial Sequence
  synthetic circulating small noncoding RNA (sncRNA) 5' transfer RNA (tRNA) half
ggttgtgggttc

SEQ ID NO: 23684 - DNA, 11 bp, Artificial Sequence
  synthetic circulating small noncoding RNA (sncRNA) 5' transfer RNA (tRNA) half
cgaacccaggc

SEQ ID NO: 23685 - DNA, 16 bp, Artificial Sequence
  synthetic circulating small noncoding RNA (sncRNA) 5' transfer RNA (tRNA) half
acatcccccgaccgct

SEQ ID NO: 23686 - DNA, 12 bp, Artificial Sequence
  synthetic circulating small noncoding RNA (sncRNA) 5' transfer RNA (tRNA) half
ggggaatcgaac

SEQ ID NO: 23687 - DNA, 10 bp, Artificial Sequence
  synthetic circulating small noncoding RNA (sncRNA) 5' transfer RNA (tRNA) half
gaacctgcgc

SEQ ID NO: 23688 - DNA, 32 bp, Artificial Sequence
  synthetic circulating small noncoding RNA (sncRNA) 5' YRNA-derived fragment
ggctggtccgatggtagtgggttatcagaact

SEQ ID NO: 23689 - DNA, 31 bp, Artificial Sequence
  synthetic circulating small noncoding RNA (sncRNA) 5' YRNA-derived fragment
ggctggtccgatggtagtgggttatcagaac

SEQ ID NO: 23690 - DNA, 32 bp, Artificial Sequence; identical to SEQ ID NO: 8
  synthetic circulating small noncoding RNA (sncRNA) 5' YRNA-derived fragment

SEQ ID NO: 23691 - DNA, 27 bp, Artificial Sequence
  synthetic circulating small noncoding RNA (sncRNA) 5' YRNA-derived fragment
ccccccactgctaaatttgactggctt

SEQ ID NO: 23692 - DNA, 31 bp, Artificial Sequence
  synthetic circulating small noncoding RNA (sncRNA) 5' YRNA-derived fragment
gttctgataacccactaccatcggaccagcc

SEQ ID NO: 23693 - DNA, 33 bp, Artificial Sequence
  synthetic circulating small noncoding RNA (sncRNA) 5' YRNA-derived fragment
ggctggtccgatggtagtgggttatcagaactt

SEQ ID NO: 23694 - DNA, 28 bp, Artificial Sequence
  synthetic circulating small noncoding RNA (sncRNA) 5' YRNA-derived fragment
ccccccactgctaaatttgactggcttt

SEQ ID NO: 23695 - DNA, 31 bp, Artificial Sequence
  synthetic circulating small noncoding RNA (sncRNA) 5' YRNA-derived fragment
agttggtccgagtgttgtgggttattgttaa

SEQ ID NO: 23696 - DNA, 32 bp, Artificial Sequence
  synthetic circulating small noncoding RNA (sncRNA) 5' YRNA-derived fragment
agttctgataacccactaccatcggaccagtc

SEQ ID NO: 23697 - DNA, 27 bp, Artificial Sequence
  synthetic circulating small noncoding RNA (sncRNA) 5' YRNA-derived fragment
aagccagtcaaatttagcagtgggggg

SEQ ID NO: 23698 - DNA, 36 bp, Artificial Sequence
  synthetic circulating small noncoding RNA (sncRNA) 5' YRNA-derived fragment
ggctggtccgatggtagtgggttatcagaacttatt

SEQ ID NO: 23699 - DNA, 32 bp, Artificial Sequence
  synthetic circulating small noncoding RNA (sncRNA) 5' YRNA-derived fragment
ggcttgtctgatggtagtgggttatcagaact

SEQ ID NO: 23700 - DNA, 30 bp, Artificial Sequence
  synthetic circulating small noncoding RNA (sncRNA) 5' YRNA-derived fragment
ttgagataactcactaccttcggaccagcc

SEQ ID NO: 23701 - DNA, 37 bp, Artificial Sequence
  synthetic circulating small noncoding RNA (sncRNA) 5' YRNA-derived fragment
ggctggtccgatggtagtgggttatcagaacttatta

SEQ ID NO: 23702 - DNA, 31 bp, Artificial Sequence
  synthetic circulating small noncoding RNA (sncRNA) 5' YRNA-derived fragment
attgagataactcactaccttcggaccagcc

SEQ ID NO: 23703 - DNA, 26 bp, Artificial Sequence
  synthetic circulating small noncoding RNA (sncRNA) 5' YRNA-derived fragment
cccccactgctaaatttgactggctt

SEQ ID NO: 23704 - DNA, 34 bp, Artificial Sequence
  synthetic circulating small noncoding RNA (sncRNA) 5' YRNA-derived fragment
ggctggtccgatggtagtgggttatcagaactta

SEQ ID NO: 23705 - DNA, 32 bp, Artificial Sequence
  synthetic circulating small noncoding RNA (sncRNA) 5' YRNA-derived fragment
atttctgataacccactaccatcggaccagcc

SEQ ID NO: 23706 - DNA, 30 bp, Artificial Sequence
  synthetic circulating small noncoding RNA (sncRNA) 5' YRNA-derived fragment
agttggtccgagtgttgtgggttattgtta

SEQ ID NO: 23707 - DNA, 32 bp, Artificial Sequence
  synthetic circulating small noncoding RNA (sncRNA) 5' YRNA-derived fragment
agttggtccgagtgttgtgggttattgttaag

SEQ ID NO: 23708 - DNA, 28 bp, Artificial Sequence
  synthetic circulating small noncoding RNA (sncRNA) 5' YRNA-derived fragment
ggtccgatggtagtgggttatcagaact

SEQ ID NO: 23709 - DNA, 32 bp, Artificial Sequence
  synthetic circulating small noncoding RNA (sncRNA) 5' YRNA-derived fragment
ggctggtccaatggtagtggtttatcagaact

SEQ ID NO: 23710 - DNA, 39 bp, Artificial Sequence
  synthetic circulating small noncoding RNA (sncRNA) 5' YRNA-derived fragment
ggctggtccgatggtagtgggttatcagaacttattaac

SEQ ID NO: 23711 - DNA, 31 bp, Artificial Sequence
  synthetic circulating small noncoding RNA (sncRNA) 5' YRNA-derived fragment
gctggtccgatggtagtgggttatcagaact

SEQ ID NO: 23712 - DNA, 28 bp, Artificial Sequence
  synthetic circulating small noncoding RNA (sncRNA) 5' YRNA-derived fragment
agttggtccgagtgttgtgggttattgt

SEQ ID NO: 23713 - DNA, 29 bp, Artificial Sequence
  synthetic circulating small noncoding RNA (sncRNA) 5' YRNA-derived fragment
agttggtccgagtgttgtgggttattgtt

SEQ ID NO: 23714 - DNA, 32 bp, Artificial Sequence
  synthetic circulating small noncoding RNA (sncRNA) 5' YRNA-derived fragment
aattgagataactcactaccttcggaccagcc

SEQ ID NO: 23715 - DNA, 31 bp, Artificial Sequence
  synthetic circulating small noncoding RNA (sncRNA) 5' YRNA-derived fragment
gttctgataacccactaccatcggaccagtc

SEQ ID NO: 23716 - DNA, 32 bp, Artificial Sequence
  synthetic circulating small noncoding RNA (sncRNA) 5' YRNA-derived fragment
agttctgataacccactaccattggacaagcc

SEQ ID NO: 23717 - DNA, 25 bp, Artificial Sequence
  synthetic circulating small noncoding RNA (sncRNA) 5' YRNA-derived fragment
ccgatggtagtgggttatcagaact

SEQ ID NO: 23718 - DNA, 32 bp, Artificial Sequence
  synthetic circulating small noncoding RNA (sncRNA) 5' YRNA-derived fragment
agttctgataacccactaccatccgacaagcc

SEQ ID NO: 23719 - DNA, 26 bp, Artificial Sequence
  synthetic circulating small noncoding RNA (sncRNA) 5' YRNA-derived fragment
ccccccactgctaaatttgactggct

SEQ ID NO: 23720 - DNA, 32 bp, Artificial Sequence
  synthetic circulating small noncoding RNA (sncRNA) 5' YRNA-derived fragment
ggctggtccgatggtagtgggttaccagaact

SEQ ID NO: 23721 - DNA, 32 bp, Artificial Sequence
  synthetic circulating small noncoding RNA (sncRNA) 5' YRNA-derived fragment
ggctggtccgatggtagtgatttatcagaact

SEQ ID NO: 23722 - DNA, 31 bp, Artificial Sequence
  synthetic circulating small noncoding RNA (sncRNA) 5' YRNA-derived fragment
ggcttgtctgatggtagtgggttatcagaac

SEQ ID NO: 23723 - DNA, 40 bp, Artificial Sequence
  synthetic circulating small noncoding RNA (sncRNA) 5' YRNA-derived fragment
ggctggtccgatggtagtgggttatcagaacttattaaca

SEQ ID NO: 23724 - DNA, 30 bp, Artificial Sequence
  synthetic circulating small noncoding RNA (sncRNA) 5' YRNA-derived fragment
gctggtccgatggtagtgggttatcagaac

SEQ ID NO: 23725 - DNA, 33 bp, Artificial Sequence
  synthetic circulating small noncoding RNA (sncRNA) 5' YRNA-derived fragment
agttggtccgagtgttgtgggttattgttaagt

SEQ ID NO: 23726 - DNA, 28 bp, Artificial Sequence
  synthetic circulating small noncoding RNA (sncRNA) 5' YRNA-derived fragment
ggctggtccgatggtagtgggttatcag

SEQ ID NO: 23727 - DNA, 32 bp, Artificial Sequence
  synthetic circulating small noncoding RNA (sncRNA) 5' YRNA-derived fragment
ggctggtcagatggtagtgggttatcagaact

SEQ ID NO: 23728 - DNA, 32 bp, Artificial Sequence
  synthetic circulating small noncoding RNA (sncRNA) 5' YRNA-derived fragment
agctctgacaacccactaccatcggaccagcc

SEQ ID NO: 23729 - DNA, 26 bp, Artificial Sequence
  synthetic circulating small noncoding RNA (sncRNA) 5' YRNA-derived fragment
aagccagtcaaatttagcagtggggg

SEQ ID NO: 23730 - DNA, 32 bp, Artificial Sequence
  synthetic circulating small noncoding RNA (sncRNA) 5' YRNA-derived fragment
ggctggtcctatggtagtgggttatcagaact

SEQ ID NO: 23731 - DNA, 26 bp, Artificial Sequence
  synthetic circulating small noncoding RNA (sncRNA) 5' YRNA-derived fragment
ggctggtccgatggtagtgggttatc

SEQ ID NO: 23732 - DNA, 34 bp, Artificial Sequence
  synthetic circulating small noncoding RNA (sncRNA) 5' YRNA-derived fragment
agttggtccgagtgttgtgggttattgttaagtt

SEQ ID NO: 23733 - DNA, 30 bp, Artificial Sequence
  synthetic circulating small noncoding RNA (sncRNA) 5' YRNA-derived fragment
ggctggtccgatggtagtgggttatcagaa

SEQ ID NO: 23734 - DNA, 27 bp, Artificial Sequence
  synthetic circulating small noncoding RNA (sncRNA) 5' YRNA-derived fragment
cccccactgctaaatttgactggcttt

SEQ ID NO: 23735 - DNA, 28 bp, Artificial Sequence
  synthetic circulating small noncoding RNA (sncRNA) 5' YRNA-derived fragment
aaagccagtcaaatttagcagtgggggg

SEQ ID NO: 23736 - DNA, 32 bp, Artificial Sequence
  synthetic circulating small noncoding RNA (sncRNA) 5' YRNA-derived fragment
ggctggtccgatggtagcgggttatcagaacc

SEQ ID NO: 23737 - DNA, 28 bp, Artificial Sequence
  synthetic circulating small noncoding RNA (sncRNA) 5' YRNA-derived fragment
agttctgataacccactaccatcggacc

SEQ ID NO: 23738 - DNA, 32 bp, Artificial Sequence
  synthetic circulating small noncoding RNA (sncRNA) 5' YRNA-derived fragment
tacaaccccccactgctaaatttgactggctt

SEQ ID NO: 23739 - DNA, 31 bp, Artificial Sequence
  synthetic circulating small noncoding RNA (sncRNA) 5' YRNA-derived fragment
tttctgataacccactaccatcggaccagcc

SEQ ID NO: 23740 - DNA, 29 bp, Artificial Sequence
  synthetic circulating small noncoding RNA (sncRNA) 5' YRNA-derived fragment
ggctggtccgatggtagtgggttatcaga

SEQ ID NO: 23741 - DNA, 32 bp, Artificial Sequence
  synthetic circulating small noncoding RNA (sncRNA) 5' YRNA-derived fragment
agttctgataacccactaccatcgaaccagcc

SEQ ID NO: 23742 - DNA, 31 bp, Artificial Sequence
  synthetic circulating small noncoding RNA (sncRNA) 5' YRNA-derived fragment
ggctggtccgatggtagcgggttatcagaac

SEQ ID NO: 23743 - DNA, 32 bp, Artificial Sequence
  synthetic circulating small noncoding RNA (sncRNA) 5' YRNA-derived fragment
agttctgatgacccactaccatcggaccagcc

SEQ ID NO: 23744 - DNA, 27 bp, Artificial Sequence
  synthetic circulating small noncoding RNA (sncRNA) 5' YRNA-derived fragment
ggtccgatggtagtgggttatcagaac

SEQ ID NO: 23745 - DNA, 31 bp, Artificial Sequence
  synthetic circulating small noncoding RNA (sncRNA) 5' YRNA-derived fragment
ggctggtccaatggtagtggtttatcagaac

SEQ ID NO: 23746 - DNA, 34 bp, Artificial Sequence
  synthetic circulating small noncoding RNA (sncRNA) 5' YRNA-derived fragment
tatacaaccccccactgctaaatttgactggctt

SEQ ID NO: 23747 - DNA, 25 bp, Artificial Sequence
  synthetic circulating small noncoding RNA (sncRNA) 5' YRNA-derived fragment
agttctgataacccactaccatcgg

SEQ ID NO: 23748 - DNA, 26 bp, Artificial Sequence
  synthetic circulating small noncoding RNA (sncRNA) 5' YRNA-derived fragment
tccgatggtagtgggttatcagaact

SEQ ID NO: 23749 - DNA, 26 bp, Artificial Sequence
  synthetic circulating small noncoding RNA (sncRNA) 5' YRNA-derived fragment
agttggtccgagtgttgtgggttatt

SEQ ID NO: 23750 - DNA, 32 bp, Artificial Sequence
  synthetic circulating small noncoding RNA (sncRNA) 5' YRNA-derived fragment
agttctgataacccactaccattggaccaggc

SEQ ID NO: 23751 - DNA, 18 bp, Artificial Sequence
  synthetic circulating small noncoding RNA (sncRNA) 5' YRNA-derived fragment
tagtgggttatcagaact

SEQ ID NO: 23752 - DNA, 26 bp, Artificial Sequence
  synthetic circulating small noncoding RNA (sncRNA) 5' YRNA-derived fragment
agccagtcaaatttagcagtgggggg

SEQ ID NO: 23753 - DNA, 27 bp, Artificial Sequence
  synthetic circulating small noncoding RNA (sncRNA) 5' YRNA-derived fragment
gtccgatggtagtgggttatcagaact

SEQ ID NO: 23754 - DNA, 32 bp, Artificial Sequence
  synthetic circulating small noncoding RNA (sncRNA) 5' YRNA-derived fragment
agttctgataacccactaccattggaccagcc

SEQ ID NO: 23755 - DNA, 33 bp, Artificial Sequence
  synthetic circulating small noncoding RNA (sncRNA) 5' YRNA-derived fragment
gagttctgataacccactaccatcggaccagcc

SEQ ID NO: 23756 - DNA, 32 bp, Artificial Sequence
  synthetic circulating small noncoding RNA (sncRNA) 5' YRNA-derived fragment
agttctgataacctactaccatcggaccagcc

SEQ ID NO: 23757 - DNA, 31 bp, Artificial Sequence
  synthetic circulating small noncoding RNA (sncRNA) 5' YRNA-derived fragment
agttctgataacccactaccatcggaccagc

SEQ ID NO: 23758 - DNA, 40 bp, Artificial Sequence
  synthetic circulating small noncoding RNA (sncRNA) 5' YRNA-derived fragment
ggctggtcctatggtagtgggttatcagaacttattaact

SEQ ID NO: 23759 - DNA, 32 bp, Artificial Sequence
  synthetic circulating small noncoding RNA (sncRNA) 5' YRNA-derived fragment
ggctggtacaatggtagtgggttatcagaact

SEQ ID NO: 23760 - DNA, 28 bp, Artificial Sequence
  synthetic circulating small noncoding RNA (sncRNA) 5' YRNA-derived fragment
ctgataacccactaccatcggaccagcc

SEQ ID NO: 23761 - DNA, 31 bp, Artificial Sequence
  synthetic circulating small noncoding RNA (sncRNA) 5' YRNA-derived fragment
gttctgataacccactaccatccgacaagcc

SEQ ID NO: 23762 - DNA, 29 bp, Artificial Sequence
  synthetic circulating small noncoding RNA (sncRNA) 5' YRNA-derived fragment
ccccccactgctaaatttgactggctttt

SEQ ID NO: 23763 - DNA, 32 bp, Artificial Sequence
  synthetic circulating small noncoding RNA (sncRNA) 5' YRNA-derived fragment
ggctggtctgatggtagtgggttatcagagct

SEQ ID NO: 23764 - DNA, 31 bp, Artificial Sequence
  synthetic circulating small noncoding RNA (sncRNA) 5' YRNA-derived fragment
gttctgataacccactaccattggacaagcc

SEQ ID NO: 23765 - DNA, 32 bp, Artificial Sequence
  synthetic circulating small noncoding RNA (sncRNA) 5' YRNA-derived fragment
ggctggtctgatggtagtgggttatcagaact

SEQ ID NO: 23766 - DNA, 26 bp, Artificial Sequence
  synthetic circulating small noncoding RNA (sncRNA) 5' YRNA-derived fragment
gataacccactaccatcggaccagcc

SEQ ID NO: 23767 - DNA, 33 bp, Artificial Sequence
  synthetic circulating small noncoding RNA (sncRNA) 5' YRNA-derived fragment
tacaaccccccactgctaaatttgactggcttt

SEQ ID NO: 23768 - DNA, 31 bp, Artificial Sequence
  synthetic circulating small noncoding RNA (sncRNA) 5' YRNA-derived fragment
ggctggtccgatggtagtgggttaccagaac

SEQ ID NO: 23769 - DNA, 27 bp, Artificial Sequence
  synthetic circulating small noncoding RNA (sncRNA) 5' YRNA-derived fragment
aaaccagtcaaatttagcagtgggggg

SEQ ID NO: 23770 - DNA, 32 bp, Artificial Sequence
  synthetic circulating small noncoding RNA (sncRNA) 5' YRNA-derived fragment
ggctggtccgatggtagcaggttatcagaact

SEQ ID NO: 23771 - DNA, 18 bp, Artificial Sequence
  synthetic circulating small noncoding RNA (sncRNA) 5' YRNA-derived fragment
agttggtccgagtgttgt

SEQ ID NO: 23772 - DNA, 29 bp, Artificial Sequence
  synthetic circulating small noncoding RNA (sncRNA) 5' YRNA-derived fragment
ggtccgatggtagtgggttatcagaactt

SEQ ID NO: 23773 - DNA, 30 bp, Artificial Sequence
  synthetic circulating small noncoding RNA (sncRNA) 5' YRNA-derived fragment
ttctgataacccactaccatcggaccagcc

SEQ ID NO: 23774 - DNA, 23 bp, Artificial Sequence
  synthetic circulating small noncoding RNA (sncRNA) 5' YRNA-derived fragment
gatggtagtgggttatcagaact

SEQ ID NO: 23775 - DNA, 29 bp, Artificial Sequence
  synthetic circulating small noncoding RNA (sncRNA) 5' YRNA-derived fragment
tggtccgatggtagtgggttatcagaact

SEQ ID NO: 23776 - DNA, 31 bp, Artificial Sequence
  synthetic circulating small noncoding RNA (sncRNA) 5' YRNA-derived fragment
ggctggtccgatggtagtgatttatcagaac

SEQ ID NO: 23777 - DNA, 24 bp, Artificial Sequence
  synthetic circulating small noncoding RNA (sncRNA) 5' YRNA-derived fragment
cgatggtagtgggttatcagaact

SEQ ID NO: 23778 - DNA, 32 bp, Artificial Sequence
  synthetic circulating small noncoding RNA (sncRNA) 5' YRNA-derived fragment
tgctagtctgatggtagtgggttatcagaact

SEQ ID NO: 23779 - DNA, 19 bp, Artificial Sequence
  synthetic circulating small noncoding RNA (sncRNA) 5' YRNA-derived fragment
gtagtgggttatcagaact

SEQ ID NO: 23780 - DNA, 31 bp, Artificial Sequence
  synthetic circulating small noncoding RNA (sncRNA) 5' YRNA-derived fragment
gctctgacaacccactaccatcggaccagcc

SEQ ID NO: 23781 - DNA, 31 bp, Artificial Sequence
  synthetic circulating small noncoding RNA (sncRNA) 5' YRNA-derived fragment
ggctggtcagatggtagtgggttatcagaac

SEQ ID NO: 23782 - DNA, 25 bp, Artificial Sequence
  synthetic circulating small noncoding RNA (sncRNA) 5' YRNA-derived fragment
cccccactgctaaatttgactggct

SEQ ID NO: 23783 - DNA, 28 bp, Artificial Sequence
  synthetic circulating small noncoding RNA (sncRNA) 5' YRNA-derived fragment
tagccagtcagattttagcagtgggggg

SEQ ID NO: 23784 - DNA, 27 bp, Artificial Sequence
  synthetic circulating small noncoding RNA (sncRNA) 5' YRNA-derived fragment
agttggtccgagtgttgtgggttattg

SEQ ID NO: 23785 - DNA, 38 bp, Artificial Sequence
  synthetic circulating small noncoding RNA (sncRNA) 5' YRNA-derived fragment
ggctggtccgatggtagtgggttatcagaacttattaa

SEQ ID NO: 23786 - DNA, 31 bp, Artificial Sequence
  synthetic circulating small noncoding RNA (sncRNA) 5' YRNA-derived fragment
ggctggtcctatggtagtgggttatcagaac

SEQ ID NO: 23787 - DNA, 18 bp, Artificial Sequence
  synthetic circulating small noncoding RNA (sncRNA) 5' YRNA-derived fragment
gctaaatttgactggctt

SEQ ID NO: 23788 - DNA, 33 bp, Artificial Sequence
  synthetic circulating small noncoding RNA (sncRNA) 5' YRNA-derived fragment
aagttctgataacccactaccatcggaccagtc

SEQ ID NO: 23789 - DNA, 18 bp, Artificial Sequence
  synthetic circulating small noncoding RNA (sncRNA) 5' YRNA-derived fragment
agttctgataacccacta

SEQ ID NO: 23790 - DNA, 30 bp, Artificial Sequence
  synthetic circulating small noncoding RNA (sncRNA) 5' YRNA-derived fragment
gttctgataacccactaccatcggaccagc

SEQ ID NO: 23791 - DNA, 35 bp, Artificial Sequence
  synthetic circulating small noncoding RNA (sncRNA) 5' YRNA-derived fragment
ggctggtccgatggtagtgggttatcagaacttat

SEQ ID NO: 23792 - DNA, 29 bp, Artificial Sequence
  synthetic circulating small noncoding RNA (sncRNA) 5' YRNA-derived fragment
tctgataacccactaccatcggaccagcc

SEQ ID NO: 23793 - DNA, 18 bp, Artificial Sequence
  synthetic circulating small noncoding RNA (sncRNA) 5' YRNA-derived fragment
ggctggtccgatggtagt

SEQ ID NO: 23794 - DNA, 27 bp, Artificial Sequence
  synthetic circulating small noncoding RNA (sncRNA) 5' YRNA-derived fragment
aagccagtaaaatttagcagtggggag

SEQ ID NO: 23795 - DNA, 23 bp, Artificial Sequence
  synthetic circulating small noncoding RNA (sncRNA) 5' YRNA-derived fragment
ccccccactgctaaatttgactg

SEQ ID NO: 23796 - DNA, 23 bp, Artificial Sequence
  synthetic circulating small noncoding RNA (sncRNA) 5' YRNA-derived fragment
ggctggtccgatggtagtgggtt

SEQ ID NO: 23797 - DNA, 27 bp, Artificial Sequence
  synthetic circulating small noncoding RNA (sncRNA) 5' YRNA-derived fragment
cagccagtcaaatttagcagtgggggg

SEQ ID NO: 23798 - DNA, 27 bp, Artificial Sequence
  synthetic circulating small noncoding RNA (sncRNA) 5' YRNA-derived fragment
gttctgataacccactaccatcggacc

SEQ ID NO: 23799 - DNA, 32 bp, Artificial Sequence
  synthetic circulating small noncoding RNA (sncRNA) 5' YRNA-derived fragment
ggcttttccgatggtagtgggttatctgaact

SEQ ID NO: 23800 - DNA, 27 bp, Artificial Sequence
  synthetic circulating small noncoding RNA (sncRNA) 5' YRNA-derived fragment
aagccattcaaatttagcagtgggggg

SEQ ID NO: 23801 - DNA, 32 bp, Artificial Sequence
  synthetic circulating small noncoding RNA (sncRNA) 5' YRNA-derived fragment
agttctgataacccactactatcggaccagcc

SEQ ID NO: 23802 - DNA, 43 bp, Artificial Sequence
  synthetic circulating small noncoding RNA (sncRNA) 5' YRNA-derived fragment
taaagttggtatacaaccccccactgctaaatttgactggctt

SEQ ID NO: 23803 - DNA, 32 bp, Artificial Sequence
  synthetic circulating small noncoding RNA (sncRNA) 5' YRNA-derived fragment
gctggtccgatggtagtgggttatcagaactt

SEQ ID NO: 23804 - DNA, 29 bp, Artificial Sequence
  synthetic circulating small noncoding RNA (sncRNA) 5' YRNA-derived fragment
ttgagataactcactaccttcggaccagc

SEQ ID NO: 23805 - DNA, 27 bp, Artificial Sequence
  synthetic circulating small noncoding RNA (sncRNA) 5' YRNA-derived fragment
ggctggtccgatggtagtgggttatca

SEQ ID NO: 23806 - DNA, 26 bp, Artificial Sequence
  synthetic circulating small noncoding RNA (sncRNA) 5' YRNA-derived fragment
ccccccacaaccgcgcttgactagct

SEQ ID NO: 23807 - DNA, 22 bp, Artificial Sequence
  synthetic circulating small noncoding RNA (sncRNA) 5' YRNA-derived fragment
ggctggtccgatggtagtgggt

SEQ ID NO: 23808 - DNA, 18 bp, Artificial Sequence
  synthetic circulating small noncoding RNA (sncRNA) 5' YRNA-derived fragment
tagtgggttatcagaaca

SEQ ID NO: 23809 - DNA, 27 bp, Artificial Sequence
  synthetic circulating small noncoding RNA (sncRNA) 5' YRNA-derived fragment
aagccagtcaaatttagcagtggggtg

SEQ ID NO: 23810 - DNA, 22 bp, Artificial Sequence
  synthetic circulating small noncoding RNA (sncRNA) 5' YRNA-derived fragment
gagtgttgtgggttattgttaa

SEQ ID NO: 23811 - DNA, 32 bp, Artificial Sequence
  synthetic circulating small noncoding RNA (sncRNA) 5' YRNA-derived fragment
agttctgataacccactaccatcagaccagcc

SEQ ID NO: 23812 - DNA, 23 bp, Artificial Sequence
  synthetic circulating small noncoding RNA (sncRNA) 5' YRNA-derived fragment
ttctcactactgcacttgactag

SEQ ID NO: 23813 - DNA, 26 bp, Artificial Sequence
  synthetic circulating small noncoding RNA (sncRNA) 5' YRNA-derived fragment
aaccagtcaaatttagcagtgggggg

SEQ ID NO: 23814 - DNA, 26 bp, Artificial Sequence
  synthetic circulating small noncoding RNA (sncRNA) 5' YRNA-derived fragment
ctcccactgcttcacttgactagcct

SEQ ID NO: 23815 - DNA, 32 bp, Artificial Sequence
  synthetic circulating small noncoding RNA (sncRNA) 5' YRNA-derived fragment
ggctggtctgatggtagtgggttatcagaatt

SEQ ID NO: 23816 - DNA, 25 bp, Artificial Sequence
  synthetic circulating small noncoding RNA (sncRNA) 5' YRNA-derived fragment
ccccccactgctaaatttgactggc

SEQ ID NO: 23817 - DNA, 23 bp, Artificial Sequence
  synthetic circulating small noncoding RNA (sncRNA) 5' YRNA-derived fragment
agttggtccgagtgttgtgggtt

SEQ ID NO: 23818 - DNA, 26 bp, Artificial Sequence
  synthetic circulating small noncoding RNA (sncRNA) 5' YRNA-derived fragment
agttctgataacccactaccatcgga

SEQ ID NO: 23819 - DNA, 35 bp, Artificial Sequence
  synthetic circulating small noncoding RNA (sncRNA) 5' YRNA-derived fragment
tatacaaccccccactgctaaatttgactggcttt

SEQ ID NO: 23820 - DNA, 27 bp, Artificial Sequence
  synthetic circulating small noncoding RNA (sncRNA) 5' YRNA-derived fragment
agttctgataacccactaccatcggac

SEQ ID NO: 23821 - DNA, 28 bp, Artificial Sequence
  synthetic circulating small noncoding RNA (sncRNA) 5' YRNA-derived fragment
tggtccgatggtagtgggttatcagaac

SEQ ID NO: 23822 - DNA, 19 bp, Artificial Sequence
  synthetic circulating small noncoding RNA (sncRNA) 5' YRNA-derived fragment
agttggtccgagtgttgtg

SEQ ID NO: 23823 - DNA, 40 bp, Artificial Sequence
  synthetic circulating small noncoding RNA (sncRNA) 5' YRNA-derived fragment
agttggtatacaaccccccactgctaaatttgactggctt

SEQ ID NO: 23824 - DNA, 31 bp, Artificial Sequence
  synthetic circulating small noncoding RNA (sncRNA) 5' YRNA-derived fragment
gttctgataacccactaccatcgaaccagcc

SEQ ID NO: 23825 - DNA, 32 bp, Artificial Sequence
  synthetic circulating small noncoding RNA (sncRNA) 5' YRNA-derived fragment
aattctgataacccactaccatcagaccagcc

SEQ ID NO: 23826 - DNA, 23 bp, Artificial Sequence
  synthetic circulating small noncoding RNA (sncRNA) 5' YRNA-derived fragment
agttctgataacccactaccatc

SEQ ID NO: 23827 - DNA, 32 bp, Artificial Sequence
  synthetic circulating small noncoding RNA (sncRNA) 5' YRNA-derived fragment
ggctggtccaatgatagtgggttatcagaact

SEQ ID NO: 23828 - DNA, 19 bp, Artificial Sequence
  synthetic circulating small noncoding RNA (sncRNA) 5' YRNA-derived fragment
agttctgataacccactac

SEQ ID NO: 23829 - DNA, 30 bp, Artificial Sequence
  synthetic circulating small noncoding RNA (sncRNA) 5' YRNA-derived fragment
ttgagataactcactacctttggaccagac

SEQ ID NO: 23830 - DNA, 21 bp, Artificial Sequence
  synthetic circulating small noncoding RNA (sncRNA) 5' YRNA-derived fragment
actgctaaatttgactggctt

SEQ ID NO: 23831 - DNA, 30 bp, Artificial Sequence
  synthetic circulating small noncoding RNA (sncRNA) 5' YRNA-derived fragment
ggctggtccgagtgcagtggtgtttacaac

SEQ ID NO: 23832 - DNA, 31 bp, Artificial Sequence
  synthetic circulating small noncoding RNA (sncRNA) 5' YRNA-derived fragment
gttctgatgacccactaccatcggaccagcc

SEQ ID NO: 23833 - DNA, 25 bp, Artificial Sequence
  synthetic circulating small noncoding RNA (sncRNA) 5' YRNA-derived fragment
tcccactgcttcacttgactagcct

SEQ ID NO: 23834 - DNA, 32 bp, Artificial Sequence
  synthetic circulating small noncoding RNA (sncRNA) 5' YRNA-derived fragment
agttctgataacccactaccattgggccagcc

SEQ ID NO: 23835 - DNA, 27 bp, Artificial Sequence
  synthetic circulating small noncoding RNA (sncRNA) 5' YRNA-derived fragment
aaagccagtcaaatttagcagtggggg

SEQ ID NO: 23836 - DNA, 33 bp, Artificial Sequence
  synthetic circulating small noncoding RNA (sncRNA) 5' YRNA-derived fragment
ggcttgtctgatggtagtgggttatcagaactt

SEQ ID NO: 23837 - DNA, 36 bp, Artificial Sequence
  synthetic circulating small noncoding RNA (sncRNA) 5' YRNA-derived fragment
aataagttctgataacccactaccatcggaccagtc

SEQ ID NO: 23838 - DNA, 26 bp, Artificial Sequence
  synthetic circulating small noncoding RNA (sncRNA) 5' YRNA-derived fragment
gataactcactaccttcggaccagcc

SEQ ID NO: 23839 - DNA, 24 bp, Artificial Sequence
  synthetic circulating small noncoding RNA (sncRNA) 5' YRNA-derived fragment
agttctgataacccactaccatcg

SEQ ID NO: 23840 - DNA, 22 bp, Artificial Sequence
  synthetic circulating small noncoding RNA (sncRNA) 5' YRNA-derived fragment
cactgctaaatttgactggctt

SEQ ID NO: 23841 - DNA, 31 bp, Artificial Sequence
  synthetic circulating small noncoding RNA (sncRNA) 5' YRNA-derived fragment
gttctgataacccactaccattggaccaggc

SEQ ID NO: 23842 - DNA, 29 bp, Artificial Sequence
  synthetic circulating small noncoding RNA (sncRNA) 5' YRNA-derived fragment
agttctgataacccactaccatcggacca

SEQ ID NO: 23843 - DNA, 30 bp, Artificial Sequence
  synthetic circulating small noncoding RNA (sncRNA) 5' YRNA-derived fragment
cccccacaaccgcgcttgactagcttgctg

SEQ ID NO: 23844 - DNA, 27 bp, Artificial Sequence
  synthetic circulating small noncoding RNA (sncRNA) 5' YRNA-derived fragment
cttctcactactgcacttgactagtct

SEQ ID NO: 23845 - DNA, 31 bp, Artificial Sequence
  synthetic circulating small noncoding RNA (sncRNA) 5' YRNA-derived fragment
attgagataactcactacctttggaccagac

SEQ ID NO: 23846 - DNA, 30 bp, Artificial Sequence
  synthetic circulating small noncoding RNA (sncRNA) 5' YRNA-derived fragment
ttgagataacccactaccttcggacgagcc

SEQ ID NO: 23847 - DNA, 22 bp, Artificial Sequence
  synthetic circulating small noncoding RNA (sncRNA) 5' YRNA-derived fragment
tcccactgcttcacttgactag

SEQ ID NO: 23848 - DNA, 31 bp, Artificial Sequence
  synthetic circulating small noncoding RNA (sncRNA) 5' YRNA-derived fragment
gttctgataacctactaccatcggaccagcc

SEQ ID NO: 23849 - DNA, 35 bp, Artificial Sequence
  synthetic circulating small noncoding RNA (sncRNA) 5' YRNA-derived fragment
agttggtccgagtgttgtgggttattgttaagttg

SEQ ID NO: 23850 - DNA, 31 bp, Artificial Sequence
  synthetic circulating small noncoding RNA (sncRNA) 5' YRNA-derived fragment
ggctggtctgatggtagtgggttatcagagc

SEQ ID NO: 23851 - DNA, 30 bp, Artificial Sequence
  synthetic circulating small noncoding RNA (sncRNA) 5' YRNA-derived fragment
ccccccactgctaaatttgactggcttttt

SEQ ID NO: 23852 - DNA, 18 bp, Artificial Sequence
  synthetic circulating small noncoding RNA (sncRNA) 5' YRNA-derived fragment
actaccatcggaccagcc

SEQ ID NO: 23853 - DNA, 31 bp, Artificial Sequence
  synthetic circulating small noncoding RNA (sncRNA) 5' YRNA-derived fragment
gttctgataacccactaccattggaccagcc

SEQ ID NO: 23854 - DNA, 24 bp, Artificial Sequence
  synthetic circulating small noncoding RNA (sncRNA) 5' YRNA-derived fragment
cttctcactactgcacttgactag

SEQ ID NO: 23855 - DNA, 25 bp, Artificial Sequence
  synthetic circulating small noncoding RNA (sncRNA) 5' YRNA-derived fragment
ccccactgctaaatttgactggctt

SEQ ID NO: 23856 - DNA, 25 bp, Artificial Sequence
  synthetic circulating small noncoding RNA (sncRNA) 5' YRNA-derived fragment
ccccccacaaccgcgcttgactagc

SEQ ID NO: 23857 - DNA, 46 bp, Artificial Sequence
  synthetic circulating small noncoding RNA (sncRNA) 5' YRNA-derived fragment
cactaaagttggtatacaaccccccactgctaaatttgactggctt

SEQ ID NO: 23858 - DNA, 30 bp, Artificial Sequence
  synthetic circulating small noncoding RNA (sncRNA) 5' YRNA-derived fragment
ctggtccgatggtagtgggttatcagaact

SEQ ID NO: 23859 - DNA, 27 bp, Artificial Sequence
  synthetic circulating small noncoding RNA (sncRNA) 5' YRNA-derived fragment
aagccagtcaaatttagcagtggaggg

SEQ ID NO: 23860 - DNA, 18 bp, Artificial Sequence
  synthetic circulating small noncoding RNA (sncRNA) 5' YRNA-derived fragment
aagccagtcaaatttagc

SEQ ID NO: 23861 - DNA, 33 bp, Artificial Sequence
  synthetic circulating small noncoding RNA (sncRNA) 5' YRNA-derived fragment
aatttctgataacccactaccatcggaccagcc

SEQ ID NO: 23862 - DNA, 27 bp, Artificial Sequence
  synthetic circulating small noncoding RNA (sncRNA) 5' YRNA-derived fragment
ctcccactgcttcacttgactagcctt

SEQ ID NO: 23863 - DNA, 25 bp, Artificial Sequence
  synthetic circulating small noncoding RNA (sncRNA) 5' YRNA-derived fragment
agttggtccgagtgttgtgggttat

SEQ ID NO: 23864 - DNA, 22 bp, Artificial Sequence
  synthetic circulating small noncoding RNA (sncRNA) 5' YRNA-derived fragment
agttggtccgagtgttgtgggt

SEQ ID NO: 23865 - DNA, 18 bp, Artificial Sequence
  synthetic circulating small noncoding RNA (sncRNA) 5' YRNA-derived fragment
ggctggtccgaaggtagt

SEQ ID NO: 23866 - DNA, 31 bp, Artificial Sequence
  synthetic circulating small noncoding RNA (sncRNA) 5' YRNA-derived fragment
attgagataacccactaccttcggacgagcc

SEQ ID NO: 23867 - DNA, 25 bp, Artificial Sequence
  synthetic circulating small noncoding RNA (sncRNA) 5' YRNA-derived fragment
agccagtcaaatttagcagtggggg

SEQ ID NO: 23868 - DNA, 29 bp, Artificial Sequence
  synthetic circulating small noncoding RNA (sncRNA) 5' YRNA-derived fragment
aaaagccagtcaaatttagcagtgggggg

SEQ ID NO: 23869 - DNA, 31 bp, Artificial Sequence
  synthetic circulating small noncoding RNA (sncRNA) 5' YRNA-derived fragment
ggctggtacaatggtagtgggttatcagaac

SEQ ID NO: 23870 - DNA, 37 bp, Artificial Sequence
  synthetic circulating small noncoding RNA (sncRNA) 5' YRNA-derived fragment
taataagttctgataacccactaccatcggaccagtc

SEQ ID NO: 23871 - DNA, 28 bp, Artificial Sequence
  synthetic circulating small noncoding RNA (sncRNA) 5' YRNA-derived fragment
taagccagtcaaatttagcagtgggggg

SEQ ID NO: 23872 - DNA, 33 bp, Artificial Sequence
  synthetic circulating small noncoding RNA (sncRNA) 5' YRNA-derived fragment
caattgagataactcactaccttcggaccagcc

SEQ ID NO: 23873 - DNA, 27 bp, Artificial Sequence
  synthetic circulating small noncoding RNA (sncRNA) 5' YRNA-derived fragment
cccccaactgctaaatttgactggctt

SEQ ID NO: 23874 - DNA, 31 bp, Artificial Sequence
  synthetic circulating small noncoding RNA (sncRNA) 5' YRNA-derived fragment
ggctggtccgagtgcagtggtgtttacaact

SEQ ID NO: 23875 - DNA, 23 bp, Artificial Sequence
  synthetic circulating small noncoding RNA (sncRNA) 5' YRNA-derived fragment
cagtcaaatttagcagtgggggg

SEQ ID NO: 23876 - DNA, 31 bp, Artificial Sequence
  synthetic circulating small noncoding RNA (sncRNA) 5' YRNA-derived fragment
ggctggtctgatggtagtgggttatcagaac

SEQ ID NO: 23877 - DNA, 30 bp, Artificial Sequence
  synthetic circulating small noncoding RNA (sncRNA) 5' YRNA-derived fragment
attgagataactcactaccttcggaccagc

SEQ ID NO: 23878 - DNA, 20 bp, Artificial Sequence
  synthetic circulating small noncoding RNA (sncRNA) 5' YRNA-derived fragment
ggtagtgggttatcagaact

SEQ ID NO: 23879 - DNA, 23 bp, Artificial Sequence
  synthetic circulating small noncoding RNA (sncRNA) 5' YRNA-derived fragment
aacccactaccatcggaccagcc

SEQ ID NO: 23880 - DNA, 18 bp, Artificial Sequence
  synthetic circulating small noncoding RNA (sncRNA) 5' YRNA-derived fragment
cattagtgtcactaaagt

SEQ ID NO: 23881 - DNA, 23 bp, Artificial Sequence
  synthetic circulating small noncoding RNA (sncRNA) 5' YRNA-derived fragment
cccccacaaccgcgcttgactag

SEQ ID NO: 23882 - DNA, 33 bp, Artificial Sequence
  synthetic circulating small noncoding RNA (sncRNA) 5' YRNA-derived fragment
tggctggtccgatggtagtgggttatcagaact

SEQ ID NO: 23883 - DNA, 18 bp, Artificial Sequence
  synthetic circulating small noncoding RNA (sncRNA) 5' YRNA-derived fragment
gtagtgggttatcagaac

SEQ ID NO: 23884 - DNA, 27 bp, Artificial Sequence
  synthetic circulating small noncoding RNA (sncRNA) 5' YRNA-derived fragment
aagccagtcaaatttagcagtgagggg

SEQ ID NO: 23885 - DNA, 31 bp, Artificial Sequence
  synthetic circulating small noncoding RNA (sncRNA) 5' YRNA-derived fragment
tacaaccccccactgctaaatttgactggct

SEQ ID NO: 23886 - DNA, 27 bp, Artificial Sequence
  synthetic circulating small noncoding RNA (sncRNA) 5' YRNA-derived fragment
aagccagtcacatttagcagtgtgggg

SEQ ID NO: 23887 - DNA, 26 bp, Artificial Sequence
  synthetic circulating small noncoding RNA (sncRNA) 5' YRNA-derived fragment
gtccgatggtagtgggttatcagaac

SEQ ID NO: 23888 - DNA, 23 bp, Artificial Sequence
  synthetic circulating small noncoding RNA (sncRNA) 5' YRNA-derived fragment
ctcccactgcttcacttgactag

SEQ ID NO: 23889 - DNA, 41 bp, Artificial Sequence
  synthetic circulating small noncoding RNA (sncRNA) 5' YRNA-derived fragment
ggctggtccgatggtagtgggttatcagaacttattaacat

SEQ ID NO: 23890 - DNA, 30 bp, Artificial Sequence
  synthetic circulating small noncoding RNA (sncRNA) 5' YRNA-derived fragment
gttgtaaacaccactgcactcggaccagcc

SEQ ID NO: 23891 - DNA, 24 bp, Artificial Sequence
  synthetic circulating small noncoding RNA (sncRNA) 5' YRNA-derived fragment
cccccacaaccgcgcttgactagc

SEQ ID NO: 23892 - DNA, 20 bp, Artificial Sequence
  synthetic circulating small noncoding RNA (sncRNA) 5' YRNA-derived fragment
ctgctaaatttgactggctt

SEQ ID NO: 23893 - DNA, 31 bp, Artificial Sequence
  synthetic circulating small noncoding RNA (sncRNA) 5' YRNA-derived fragment
acaaccccccactgctaaatttgactggctt

SEQ ID NO: 23894 - DNA, 30 bp, Artificial Sequence
  synthetic circulating small noncoding RNA (sncRNA) 5' YRNA-derived fragment
caaccccccactgctaaatttgactggctt

SEQ ID NO: 23895 - DNA, 22 bp, Artificial Sequence
  synthetic circulating small noncoding RNA (sncRNA) 5' YRNA-derived fragment
acccactaccatcggaccagcc

SEQ ID NO: 23896 - DNA, 32 bp, Artificial Sequence
  synthetic circulating small noncoding RNA (sncRNA) 5' YRNA-derived fragment
ggtccgatggtagtgggttatcagaacttatt

SEQ ID NO: 23897 - DNA, 28 bp, Artificial Sequence
  synthetic circulating small noncoding RNA (sncRNA) 5' YRNA-derived fragment
gagataactcactaccttcggaccagcc

SEQ ID NO: 23898 - DNA, 26 bp, Artificial Sequence
  synthetic circulating small noncoding RNA (sncRNA) 5' YRNA-derived fragment
ctcccactgctaaatttgactggctt

SEQ ID NO: 23899 - DNA, 33 bp, Artificial Sequence
  synthetic circulating small noncoding RNA (sncRNA) 5' YRNA-derived fragment
ggctggtccaatggtagtggtttatcagaactt

SEQ ID NO: 23900 - DNA, 32 bp, Artificial Sequence
  synthetic circulating small noncoding RNA (sncRNA) 5' YRNA-derived fragment
aattgagataacccactaccttcggacgagcc

SEQ ID NO: 23901 - DNA, 25 bp, Artificial Sequence
  synthetic circulating small noncoding RNA (sncRNA) 5' YRNA-derived fragment
ggctggtccgatggtagtgggttat

SEQ ID NO: 23902 - DNA, 34 bp, Artificial Sequence
  synthetic circulating small noncoding RNA (sncRNA) 5' YRNA-derived fragment
taagttctgataacccactaccatcggaccagtc

SEQ ID NO: 23903 - DNA, 29 bp, Artificial Sequence
  synthetic circulating small noncoding RNA (sncRNA) 5' YRNA-derived fragment
aagttctgataacccactaccatcggacc

SEQ ID NO: 23904 - DNA, 30 bp, Artificial Sequence
  synthetic circulating small noncoding RNA (sncRNA) 5' YRNA-derived fragment
gttggtccgagtgttgtgggttattgttaa

SEQ ID NO: 23905 - DNA, 29 bp, Artificial Sequence
  synthetic circulating small noncoding RNA (sncRNA) 5' YRNA-derived fragment
ctggtccgatggtagtgggttatcagaac

SEQ ID NO: 23906 - DNA, 24 bp, Artificial Sequence
  synthetic circulating small noncoding RNA (sncRNA) 5' YRNA-derived fragment
ggctggtccgatggtagtgggtta

SEQ ID NO: 23907 - DNA, 24 bp, Artificial Sequence
  synthetic circulating small noncoding RNA (sncRNA) 5' YRNA-derived fragment
ccccccactgctaaatttgactgg

SEQ ID NO: 23908 - DNA, 31 bp, Artificial Sequence
  synthetic circulating small noncoding RNA (sncRNA) 5' YRNA-derived fragment
tgctagtctgatggtagtgggttatcagaac

SEQ ID NO: 23909 - DNA, 24 bp, Artificial Sequence
  synthetic circulating small noncoding RNA (sncRNA) 5' YRNA-derived fragment
ccccccacaaccgcgcttgactag

SEQ ID NO: 23910 - DNA, 26 bp, Artificial Sequence
  synthetic circulating small noncoding RNA (sncRNA) 5' YRNA-derived fragment
aaaccagtcaaatttagcagtggggg

SEQ ID NO: 23911 - DNA, 31 bp, Artificial Sequence
  synthetic circulating small noncoding RNA (sncRNA) 5' YRNA-derived fragment
gttttgataacccactaccatcagaccagcc

SEQ ID NO: 23912 - DNA, 23 bp, Artificial Sequence
  synthetic circulating small noncoding RNA (sncRNA) 5' YRNA-derived fragment
ctagtcaagtgcagtagtgagaa

SEQ ID NO: 23913 - DNA, 36 bp, Artificial Sequence
  synthetic circulating small noncoding RNA (sncRNA) 5' YRNA-derived fragment
ggcttgtctgatggtagtgggttatcagaacttatt

SEQ ID NO: 23914 - DNA, 36 bp, Artificial Sequence
  synthetic circulating small noncoding RNA (sncRNA) 5' YRNA-derived fragment
agttggtccgagtgttgtgggttattgttaagttga

SEQ ID NO: 23915 - DNA, 42 bp, Artificial Sequence
  synthetic circulating small noncoding RNA (sncRNA) 5' YRNA-derived fragment
aaagttggtatacaaccccccactgctaaatttgactggctt

SEQ ID NO: 23916 - DNA, 44 bp, Artificial Sequence
  synthetic circulating small noncoding RNA (sncRNA) 5' YRNA-derived fragment
ctaaagttggtatacaaccccccactgctaaatttgactggctt

SEQ ID NO: 23917 - DNA, 24 bp, Artificial Sequence
  synthetic circulating small noncoding RNA (sncRNA) 5' YRNA-derived fragment
ttctcactactgcacttgactagt

SEQ ID NO: 23918 - DNA, 29 bp, Artificial Sequence
  synthetic circulating small noncoding RNA (sncRNA) 5' YRNA-derived fragment
tgagataactcactaccttcggaccagcc

SEQ ID NO: 23919 - DNA, 23 bp, Artificial Sequence
  synthetic circulating small noncoding RNA (sncRNA) 5' YRNA-derived fragment
aactcactaccttcggaccagcc

SEQ ID NO: 23920 - DNA, 26 bp, Artificial Sequence
  synthetic circulating small noncoding RNA (sncRNA) 5' YRNA-derived fragment
ttctcactactgcacttgactagtct

SEQ ID NO: 23921 - DNA, 33 bp, Artificial Sequence
  synthetic circulating small noncoding RNA (sncRNA) 5' YRNA-derived fragment
aagttctgataacccactaccattggacaagcc

SEQ ID NO: 23922 - DNA, 27 bp, Artificial Sequence
  synthetic circulating small noncoding RNA (sncRNA) 5' YRNA-derived fragment
tgataacccactaccatcggaccagcc

SEQ ID NO: 23923 - DNA, 23 bp, Artificial Sequence
  synthetic circulating small noncoding RNA (sncRNA) 5' YRNA-derived fragment
ccactgctaaatttgactggctt

SEQ ID NO: 23924 - DNA, 31 bp, Artificial Sequence
  synthetic circulating small noncoding RNA (sncRNA) 5' YRNA-derived fragment
ggctggtctgatggtagtgggttatcagaat

SEQ ID NO: 23925 - DNA, 27 bp, Artificial Sequence
  synthetic circulating small noncoding RNA (sncRNA) 5' YRNA-derived fragment
cctcccactgctaaatttgactggctt

SEQ ID NO: 23926 - DNA, 33 bp, Artificial Sequence
  synthetic circulating small noncoding RNA (sncRNA) 5' YRNA-derived fragment
atacaaccccccactgctaaatttgactggctt

SEQ ID NO: 23927 - DNA, 28 bp, Artificial Sequence
  synthetic circulating small noncoding RNA (sncRNA) 5' YRNA-derived fragment
cccccactgctaaatttgactggctttt

SEQ ID NO: 23928 - DNA, 26 bp, Artificial Sequence
  synthetic circulating small noncoding RNA (sncRNA) 5' YRNA-derived fragment
tcccactgcttcacttgactagcctt

SEQ ID NO: 23929 - DNA, 24 bp, Artificial Sequence
  synthetic circulating small noncoding RNA (sncRNA) 5' YRNA-derived fragment
caaccgcgcttgactagcttgctg

SEQ ID NO: 23930 - DNA, 29 bp, Artificial Sequence
  synthetic circulating small noncoding RNA (sncRNA) 5' YRNA-derived fragment
gctggtccgatggtagtgggttatcagaa

SEQ ID NO: 23931 - DNA, 30 bp, Artificial Sequence
  synthetic circulating small noncoding RNA (sncRNA) 5' YRNA-derived fragment
tggtccgatggtagtgggttatcagaactt

SEQ ID NO: 23932 - DNA, 22 bp, Artificial Sequence
  synthetic circulating small noncoding RNA (sncRNA) 5' YRNA-derived fragment
gatggtagtgggttatcagaac

SEQ ID NO: 23933 - DNA, 22 bp, Artificial Sequence
  synthetic circulating small noncoding RNA (sncRNA) 5' YRNA-derived fragment
ttaacaataacccacaacactc

SEQ ID NO: 23934 - DNA, 21 bp, Artificial Sequence
  synthetic circulating small noncoding RNA (sncRNA) 5' YRNA-derived fragment
aagccagtcaaatttagcagt

SEQ ID NO: 23935 - DNA, 41 bp, Artificial Sequence
  synthetic circulating small noncoding RNA (sncRNA) 5' YRNA-derived fragment
ggctggtcctatggtagtgggttatcagaacttattaactt

SEQ ID NO: 23936 - DNA, 27 bp, Artificial Sequence
  synthetic circulating small noncoding RNA (sncRNA) 5' YRNA-derived fragment
ccccccacaaccgcgcttgactagctt

SEQ ID NO: 23937 - DNA, 22 bp, Artificial Sequence
  synthetic circulating small noncoding RNA (sncRNA) 5' YRNA-derived fragment
cccccactgctaaatttgactg

SEQ ID NO: 23938 - DNA, 45 bp, Artificial Sequence
  synthetic circulating small noncoding RNA (sncRNA) 5' YRNA-derived fragment
actaaagttggtatacaaccccccactgctaaatttgactggctt

SEQ ID NO: 23939 - DNA, 34 bp, Artificial Sequence
  synthetic circulating small noncoding RNA (sncRNA) 5' YRNA-derived fragment
tcaattgagataactcactaccttcggaccagcc

SEQ ID NO: 23940 - DNA, 28 bp, Artificial Sequence
  synthetic circulating small noncoding RNA (sncRNA) 5' YRNA-derived fragment
cccccccactgctaaatttgactggctt

SEQ ID NO: 23941 - DNA, 31 bp, Artificial Sequence
  synthetic circulating small noncoding RNA (sncRNA) 5' YRNA-derived fragment
ggcttttccgatggtagtgggttatctgaac

SEQ ID NO: 23942 - DNA, 30 bp, Artificial Sequence
  synthetic circulating small noncoding RNA (sncRNA) 5' YRNA-derived fragment
ttgagataactcactacctttggacaagcc

SEQ ID NO: 23943 - DNA, 33 bp, Artificial Sequence
  synthetic circulating small noncoding RNA (sncRNA) 5' YRNA-derived fragment
tatacaaccccccactgctaaatttgactggct

SEQ ID NO: 23944 - DNA, 27 bp, Artificial Sequence
  synthetic circulating small noncoding RNA (sncRNA) 5' YRNA-derived fragment
tcccccactgctaaatttgactggctt

SEQ ID NO: 23945 - DNA, 28 bp, Artificial Sequence
  synthetic circulating small noncoding RNA (sncRNA) 5' YRNA-derived fragment
ccccccacaaccgcgcttgactagcttg

SEQ ID NO: 23946 - DNA, 32 bp, Artificial Sequence
  synthetic circulating small noncoding RNA (sncRNA) 5' YRNA-derived fragment
tctccactcccactgcttcacttgactagcct

SEQ ID NO: 23947 - DNA, 25 bp, Artificial Sequence
  synthetic circulating small noncoding RNA (sncRNA) 5' YRNA-derived fragment
gccagtcaaatttagcagtgggggg

SEQ ID NO: 23948 - DNA, 39 bp, Artificial Sequence
  synthetic circulating small noncoding RNA (sncRNA) 5' YRNA-derived fragment
aacaatcaattgagataactcactaccttcggaccagcc

SEQ ID NO: 23949 - DNA, 22 bp, Artificial Sequence
  synthetic circulating small noncoding RNA (sncRNA) 5' YRNA-derived fragment
ccccacaaccgcgcttgactag

SEQ ID NO: 23950 - DNA, 31 bp, Artificial Sequence
  synthetic circulating small noncoding RNA (sncRNA) 5' YRNA-derived fragment
gttctgataacccactaccatcagaccagcc

SEQ ID NO: 23951 - DNA, 19 bp, Artificial Sequence
  synthetic circulating small noncoding RNA (sncRNA) 5' YRNA-derived fragment
gagtgttgtgggttattgt

SEQ ID NO: 23952 - DNA, 28 bp, Artificial Sequence
  synthetic circulating small noncoding RNA (sncRNA) 5' YRNA-derived fragment
cagaacttattaacattagtgtcactaa

SEQ ID NO: 23953 - DNA, 31 bp, Artificial Sequence
  synthetic circulating small noncoding RNA (sncRNA) 5' YRNA-derived fragment
attctgataacccactaccatcagaccagcc

SEQ ID NO: 23954 - DNA, 28 bp, Artificial Sequence
  synthetic circulating small noncoding RNA (sncRNA) 5' YRNA-derived fragment
gttctgataacccactaccatcggacca

SEQ ID NO: 23955 - DNA, 39 bp, Artificial Sequence
  synthetic circulating small noncoding RNA (sncRNA) 5' YRNA-derived fragment
attaataagttctgataacccactaccatcagaccagcc

SEQ ID NO: 23956 - DNA, 31 bp, Artificial Sequence
  synthetic circulating small noncoding RNA (sncRNA) 5' YRNA-derived fragment
agttgtaaacaccactgcactcggaccagcc

SEQ ID NO: 23957 - DNA, 31 bp, Artificial Sequence
  synthetic circulating small noncoding RNA (sncRNA) 5' YRNA-derived fragment
gttctgataacccactactatcggaccagcc

SEQ ID NO: 23958 - DNA, 23 bp, Artificial Sequence
  synthetic circulating small noncoding RNA (sncRNA) 5' YRNA-derived fragment
cgatggtagtgggttatcagaac

SEQ ID NO: 23959 - DNA, 24 bp, Artificial Sequence
  synthetic circulating small noncoding RNA (sncRNA) 5' YRNA-derived fragment
ccgatggtagtgggttatcagaac

SEQ ID NO: 23960 - DNA, 26 bp, Artificial Sequence
  synthetic circulating small noncoding RNA (sncRNA) 5' YRNA-derived fragment
aggctagtcaagtgaagcagtgggag

SEQ ID NO: 23961 - DNA, 21 bp, Artificial Sequence
  synthetic circulating small noncoding RNA (sncRNA) 5' YRNA-derived fragment
gagtgttgtgggttattgtta

SEQ ID NO: 23962 - DNA, 30 bp, Artificial Sequence
  synthetic circulating small noncoding RNA (sncRNA) 5' YRNA-derived fragment
ggtccgatggtagtgggttatcagaactta

SEQ ID NO: 23963 - DNA, 18 bp, Artificial Sequence
  synthetic circulating small noncoding RNA (sncRNA) 5' YRNA-derived fragment
actaccttcggaccagcc

SEQ ID NO: 23964 - DNA, 32 bp, Artificial Sequence
  synthetic circulating small noncoding RNA (sncRNA) 5' YRNA-derived fragment
aattgagataactcactacctttggaccagac

SEQ ID NO: 23965 - DNA, 24 bp, Artificial Sequence
  synthetic circulating small noncoding RNA (sncRNA) 5' YRNA-derived fragment
actagtcaagtgaagcagtgggag

SEQ ID NO: 23966 - DNA, 33 bp, Artificial Sequence
  synthetic circulating small noncoding RNA (sncRNA) 5' YRNA-derived fragment
ttctccactcccactgcttcacttgactagcct

SEQ ID NO: 23967 - DNA, 27 bp, Artificial Sequence
  synthetic circulating small noncoding RNA (sncRNA) 5' YRNA-derived fragment
ccccccactgctaaattttactagctt

SEQ ID NO: 23968 - DNA, 33 bp, Artificial Sequence
  synthetic circulating small noncoding RNA (sncRNA) 5' YRNA-derived fragment
aagctctgacaacccactaccatcggaccagcc

SEQ ID NO: 23969 - DNA, 24 bp, Artificial Sequence
  synthetic circulating small noncoding RNA (sncRNA) 5' YRNA-derived fragment
cccccactgctaaatttgactggc

SEQ ID NO: 23970 - DNA, 23 bp, Artificial Sequence
  synthetic circulating small noncoding RNA (sncRNA) 5' YRNA-derived fragment
cgagtgttgtgggttattgttaa

SEQ ID NO: 23971 - DNA, 33 bp, Artificial Sequence
  synthetic circulating small noncoding RNA (sncRNA) 5' YRNA-derived fragment
aagttctgataacccactaccatccgacaagcc

SEQ ID NO: 23972 - DNA, 27 bp, Artificial Sequence
  synthetic circulating small noncoding RNA (sncRNA) 5' YRNA-derived fragment
agactagtcaagtgcagtagtgagaag

SEQ ID NO: 23973 - DNA, 20 bp, Artificial Sequence
  synthetic circulating small noncoding RNA (sncRNA) 5' YRNA-derived fragment
gagtgttgtgggttattgtt

SEQ ID NO: 23974 - DNA, 21 bp, Artificial Sequence
  synthetic circulating small noncoding RNA (sncRNA) 5' YRNA-derived fragment
agtgttgtgggttattgttaa

SEQ ID NO: 23975 - DNA, 32 bp, Artificial Sequence
  synthetic circulating small noncoding RNA (sncRNA) 5' YRNA-derived fragment
agttctgataacccactaccatcagaccagct

SEQ ID NO: 23976 - DNA, 29 bp, Artificial Sequence
  synthetic circulating small noncoding RNA (sncRNA) 5' YRNA-derived fragment
ggctggtccgagtgcagtggtgtttacaa

SEQ ID NO: 23977 - DNA, 24 bp, Artificial Sequence
  synthetic circulating small noncoding RNA (sncRNA) 5' YRNA-derived fragment
ctagtcaagtgcagtagtgagaag

SEQ ID NO: 23978 - DNA, 22 bp, Artificial Sequence
  synthetic circulating small noncoding RNA (sncRNA) 5' YRNA-derived fragment
aagccagtcaaatttagcagtg

SEQ ID NO: 23979 - DNA, 39 bp, Artificial Sequence
  synthetic circulating small noncoding RNA (sncRNA) 5' YRNA-derived fragment
gttaataagttctgataacccactaccatcggaccagtc

SEQ ID NO: 23980 - DNA, 20 bp, Artificial Sequence
  synthetic circulating small noncoding RNA (sncRNA) 5' YRNA-derived fragment
agttctgataacccactacc

SEQ ID NO: 23981 - DNA, 28 bp, Artificial Sequence
  synthetic circulating small noncoding RNA (sncRNA) 5' YRNA-derived fragment
ttgagataactcactaccttcggaccag

SEQ ID NO: 23982 - DNA, 31 bp, Artificial Sequence
  synthetic circulating small noncoding RNA (sncRNA) 5' YRNA-derived fragment
caaccccccactgctaaatttgactggcttt

SEQ ID NO: 23983 - DNA, 37 bp, Artificial Sequence
  synthetic circulating small noncoding RNA (sncRNA) 5' YRNA-derived fragment
ggcttgtctgatggtagtgggttatcagaacttatta

SEQ ID NO: 23984 - DNA, 39 bp, Artificial Sequence
  synthetic circulating small noncoding RNA (sncRNA) 5' YRNA-derived fragment
agttggtccgagtgttgtgggttattgttaagttgattt

SEQ ID NO: 23985 - DNA, 30 bp, Artificial Sequence
  synthetic circulating small noncoding RNA (sncRNA) 5' YRNA-derived fragment
ggctggtccgaaggtagtgaattatctcaa

SEQ ID NO: 23986 - DNA, 32 bp, Artificial Sequence
  synthetic circulating small noncoding RNA (sncRNA) 5' YRNA-derived fragment
acaaccccccactgctaaatttgactggcttt

SEQ ID NO: 23987 - DNA, 19 bp, Artificial Sequence
  synthetic circulating small noncoding RNA (sncRNA) 5' YRNA-derived fragment
ggctggtccgatggtagtg

SEQ ID NO: 23988 - DNA, 20 bp, Artificial Sequence
  synthetic circulating small noncoding RNA (sncRNA) 5' YRNA-derived fragment
cacaaccgcgcttgactagc

SEQ ID NO: 23989 - DNA, 22 bp, Artificial Sequence
  synthetic circulating small noncoding RNA (sncRNA) 5' YRNA-derived fragment
tagtgggttatcagaacttatt

SEQ ID NO: 23990 - DNA, 29 bp, Artificial Sequence
  synthetic circulating small noncoding RNA (sncRNA) 5' YRNA-derived fragment
gttggtccgagtgttgtgggttattgtta

SEQ ID NO: 23991 - DNA, 27 bp, Artificial Sequence
  synthetic circulating small noncoding RNA (sncRNA) 5' YRNA-derived fragment
aagccagtcaaatttagcagttggggg

SEQ ID NO: 23992 - DNA, 19 bp, Artificial Sequence
  synthetic circulating small noncoding RNA (sncRNA) 5' YRNA-derived fragment
gtagtgggttatcagaaca

SEQ ID NO: 23993 - DNA, 31 bp, Artificial Sequence
  synthetic circulating small noncoding RNA (sncRNA) 5' YRNA-derived fragment
gttctgataacccactaccattgggccagcc

SEQ ID NO: 23994 - DNA, 33 bp, Artificial Sequence
  synthetic circulating small noncoding RNA (sncRNA) 5' YRNA-derived fragment
ggctggtccgatggtagtgatttatcagaactt

SEQ ID NO: 23995 - DNA, 27 bp, Artificial Sequence
  synthetic circulating small noncoding RNA (sncRNA) 5' YRNA-derived fragment
aaggcagtcaaatttagcagtgtgggg

SEQ ID NO: 23996 - DNA, 27 bp, Artificial Sequence
  synthetic circulating small noncoding RNA (sncRNA) 5' YRNA-derived fragment
ccccccattgctaaatttgactggctt

SEQ ID NO: 23997 - DNA, 25 bp, Artificial Sequence
  synthetic circulating small noncoding RNA (sncRNA) 5' YRNA-derived fragment
aggctagtcaagtgaagcagtggga

SEQ ID NO: 23998 - DNA, 39 bp, Artificial Sequence
  synthetic circulating small noncoding RNA (sncRNA) 5' YRNA-derived fragment
ggcttgtctgatggtagtgggttatcagaacttattatt

SEQ ID NO: 23999 - DNA, 27 bp, Artificial Sequence
  synthetic circulating small noncoding RNA (sncRNA) 5' YRNA-derived fragment
gttggtccgagtgttgtgggttattgt

SEQ ID NO: 24000 - DNA, 31 bp, Artificial Sequence
  synthetic circulating small noncoding RNA (sncRNA) 5' YRNA-derived fragment
aaccagtcaaatttagcagtggggggttgta

SEQ ID NO: 24001 - DNA, 20 bp, Artificial Sequence
  synthetic circulating small noncoding RNA (sncRNA) 5' YRNA-derived fragment
aagccagtcaaatttagcag

SEQ ID NO: 24002 - DNA, 24 bp, Artificial Sequence
  synthetic circulating small noncoding RNA (sncRNA) 5' YRNA-derived fragment
cccactgctaaatttgactggctt

SEQ ID NO: 24003 - DNA, 28 bp, Artificial Sequence
  synthetic circulating small noncoding RNA (sncRNA) 5' YRNA-derived fragment
accccccactgctaaatttgactggctt

SEQ ID NO: 24004 - DNA, 33 bp, Artificial Sequence
  synthetic circulating small noncoding RNA (sncRNA) 5' YRNA-derived fragment
agttctgataacccactaccatcggaccagcca

SEQ ID NO: 24005 - DNA, 28 bp, Artificial Sequence
  synthetic circulating small noncoding RNA (sncRNA) 5' YRNA-derived fragment
gtccgatggtagtgggttatcagaactt

SEQ ID NO: 24006 - DNA, 20 bp, Artificial Sequence
  synthetic circulating small noncoding RNA (sncRNA) 5' YRNA-derived fragment
aacattagtgtcactaaagt

SEQ ID NO: 24007 - DNA, 18 bp, Artificial Sequence
  synthetic circulating small noncoding RNA (sncRNA) 5' YRNA-derived fragment
gttctgataacccactac

SEQ ID NO: 24008 - DNA, 29 bp, Artificial Sequence
  synthetic circulating small noncoding RNA (sncRNA) 5' YRNA-derived fragment
ccccccactgctaaatttgactggcttta

SEQ ID NO: 24009 - DNA, 22 bp, Artificial Sequence
  synthetic circulating small noncoding RNA (sncRNA) 5' YRNA-derived fragment
atggtagtgggttatcagaact

SEQ ID NO: 24010 - DNA, 27 bp, Artificial Sequence
  synthetic circulating small noncoding RNA (sncRNA) 5' YRNA-derived fragment
aagccagtcaaatttatcagagggggg

SEQ ID NO: 24011 - DNA, 39 bp, Artificial Sequence
  synthetic circulating small noncoding RNA (sncRNA) 5' YRNA-derived fragment
ggctggtccgatggtagtgggttatcagaacttactaat

SEQ ID NO: 24012 - DNA, 35 bp, Artificial Sequence
  synthetic circulating small noncoding RNA (sncRNA) 5' YRNA-derived fragment
gctggtccgatggtagtgggttatcagaacttatt

SEQ ID NO: 24013 - DNA, 30 bp, Artificial Sequence
  synthetic circulating small noncoding RNA (sncRNA) 5' YRNA-derived fragment
agttctgataacccactaccatcggaccag

SEQ ID NO: 24014 - DNA, 22 bp, Artificial Sequence
  synthetic circulating small noncoding RNA (sncRNA) 5' YRNA-derived fragment
ctagtcaagtgaagcagtggga

SEQ ID NO: 24015 - DNA, 25 bp, Artificial Sequence
  synthetic circulating small noncoding RNA (sncRNA) 5' YRNA-derived fragment
tccgatggtagtgggttatcagaac

SEQ ID NO: 24016 - DNA, 24 bp, Artificial Sequence
  synthetic circulating small noncoding RNA (sncRNA) 5' YRNA-derived fragment
tcccactgcttcacttgactagcc

SEQ ID NO: 24017 - DNA, 28 bp, Artificial Sequence
  synthetic circulating small noncoding RNA (sncRNA) 5' YRNA-derived fragment
tttccgatggtagtgggttatctgaact

SEQ ID NO: 24018 - DNA, 24 bp, Artificial Sequence
  synthetic circulating small noncoding RNA (sncRNA) 5' YRNA-derived fragment
ctatggtagtgggttatcagaact

SEQ ID NO: 24019 - DNA, 31 bp, Artificial Sequence
  synthetic circulating small noncoding RNA (sncRNA) 5' YRNA-derived fragment
attgagataactcactacctttggacaagcc

SEQ ID NO: 24020 - DNA, 35 bp, Artificial Sequence
  synthetic circulating small noncoding RNA (sncRNA) 5' YRNA-derived fragment
ttaatttctgataacccactaccatcggaccagcc

SEQ ID NO: 24021 - DNA, 36 bp, Artificial Sequence
  synthetic circulating small noncoding RNA (sncRNA) 5' YRNA-derived fragment
ggctggtccaatggtagtggtttatcagaacttatt

SEQ ID NO: 24022 - DNA, 25 bp, Artificial Sequence
  synthetic circulating small noncoding RNA (sncRNA) 5' YRNA-derived fragment
cttctcactactgcacttgactagt

SEQ ID NO: 24023 - DNA, 26 bp, Artificial Sequence
  synthetic circulating small noncoding RNA (sncRNA) 5' YRNA-derived fragment
cagccagtcaaatttagcagtggggg

SEQ ID NO: 24024 - DNA, 33 bp, Artificial Sequence
  synthetic circulating small noncoding RNA (sncRNA) 5' YRNA-derived fragment
ggctggtccgatggtagtgggttaccagaactt

SEQ ID NO: 24025 - DNA, 34 bp, Artificial Sequence
  synthetic circulating small noncoding RNA (sncRNA) 5' YRNA-derived fragment
tacaaccccccactgctaaatttgactggctttt

SEQ ID NO: 24026 - DNA, 34 bp, Artificial Sequence
  synthetic circulating small noncoding RNA (sncRNA) 5' YRNA-derived fragment
ggcttgtctgatggtagtgggttatcagaactta

SEQ ID NO: 24027 - DNA, 21 bp, Artificial Sequence
  synthetic circulating small noncoding RNA (sncRNA) 5' YRNA-derived fragment
tggtagtgggttatcagaact

SEQ ID NO: 24028 - DNA, 25 bp, Artificial Sequence
  synthetic circulating small noncoding RNA (sncRNA) 5' YRNA-derived fragment
aagccagtcaaatttagcagtgggg

SEQ ID NO: 24029 - DNA, 32 bp, Artificial Sequence
  synthetic circulating small noncoding RNA (sncRNA) 5' YRNA-derived fragment
aaaccagtcaaatttagcagtggggggttgta

SEQ ID NO: 24030 - DNA, 31 bp, Artificial Sequence
  synthetic circulating small noncoding RNA (sncRNA) 5' YRNA-derived fragment
ggctggtccaatgatagtgggttatcagaac

SEQ ID NO: 24031 - DNA, 25 bp, Artificial Sequence
  synthetic circulating small noncoding RNA (sncRNA) 5' YRNA-derived fragment
gctggtccgatggtagtgggttatc

SEQ ID NO: 24032 - DNA, 23 bp, Artificial Sequence
  synthetic circulating small noncoding RNA (sncRNA) 5' YRNA-derived fragment
ctagtcaagtgaagcagtgggag

SEQ ID NO: 24033 - DNA, 27 bp, Artificial Sequence
  synthetic circulating small noncoding RNA (sncRNA) 5' YRNA-derived fragment
aaggctagtcaagtgaagcagtgggag

SEQ ID NO: 24034 - DNA, 34 bp, Artificial Sequence
  synthetic circulating small noncoding RNA (sncRNA) 5' YRNA-derived fragment
tgagttctgataacccactaccatcggaccagcc

SEQ ID NO: 24035 - DNA, 30 bp, Artificial Sequence
  synthetic circulating small noncoding RNA (sncRNA) 5' YRNA-derived fragment
ggctggtccgaatgtagtgagttatctcaa

SEQ ID NO: 24036 - DNA, 18 bp, Artificial Sequence
  synthetic circulating small noncoding RNA (sncRNA) 5' YRNA-derived fragment
actttagtgacactaatg

SEQ ID NO: 24037 - DNA, 19 bp, Artificial Sequence
  synthetic circulating small noncoding RNA (sncRNA) 5' YRNA-derived fragment
gctaaatttgactggcttt

SEQ ID NO: 24038 - DNA, 27 bp, Artificial Sequence
  synthetic circulating small noncoding RNA (sncRNA) 5' YRNA-derived fragment
aagccagtcaaatttagcagtggggga

SEQ ID NO: 24039 - DNA, 35 bp, Artificial Sequence
  synthetic circulating small noncoding RNA (sncRNA) 5' YRNA-derived fragment
ttaagttctgataacccactaccattggaccagcc

SEQ ID NO: 24040 - DNA, 25 bp, Artificial Sequence
  synthetic circulating small noncoding RNA (sncRNA) 5' YRNA-derived fragment
cccccacaaccgcgcttgactagct

SEQ ID NO: 24041 - DNA, 25 bp, Artificial Sequence
  synthetic circulating small noncoding RNA (sncRNA) 5' YRNA-derived fragment
aaccagtcaaatttagcagtggggg

SEQ ID NO: 24042 - DNA, 25 bp, Artificial Sequence
  synthetic circulating small noncoding RNA (sncRNA) 5' YRNA-derived fragment
ctcccactgcttcacttgactagcc

SEQ ID NO: 24043 - DNA, 31 bp, Artificial Sequence
  synthetic circulating small noncoding RNA (sncRNA) 5' YRNA-derived fragment
ccccccacaaccgcgcttgactagcttgctg

SEQ ID NO: 24044 - DNA, 40 bp, Artificial Sequence
  synthetic circulating small noncoding RNA (sncRNA) 5' YRNA-derived fragment
tgttaataagttctgataacccactaccatcggaccagtc

SEQ ID NO: 24045 - DNA, 33 bp, Artificial Sequence
  synthetic circulating small noncoding RNA (sncRNA) 5' YRNA-derived fragment
ggctggtccgatggtagcgggttatcagaacct

SEQ ID NO: 24046 - DNA, 28 bp, Artificial Sequence
  synthetic circulating small noncoding RNA (sncRNA) 5' YRNA-derived fragment
actcccactgcttcacttgactagcctt

SEQ ID NO: 24047 - DNA, 20 bp, Artificial Sequence
  synthetic circulating small noncoding RNA (sncRNA) 5' YRNA-derived fragment
gtgttgtgggttattgttaa

SEQ ID NO: 24048 - DNA, 27 bp, Artificial Sequence
  synthetic circulating small noncoding RNA (sncRNA) 5' YRNA-derived fragment
actcccactgcttcacttgactagcct

SEQ ID NO: 24049 - DNA, 24 bp, Artificial Sequence
  synthetic circulating small noncoding RNA (sncRNA) 5' YRNA-derived fragment
ccagtcaaatttagcagtgggggg

SEQ ID NO: 24050 - DNA, 21 bp, Artificial Sequence
  synthetic circulating small noncoding RNA (sncRNA) 5' YRNA-derived fragment
ccccccactgctaaatttgac

SEQ ID NO: 24051 - DNA, 31 bp, Artificial Sequence
  synthetic circulating small noncoding RNA (sncRNA) 5' YRNA-derived fragment
ggctggtccgaaggtagtgaattatctcaat

SEQ ID NO: 24052 - DNA, 31 bp, Artificial Sequence
  synthetic circulating small noncoding RNA (sncRNA) 5' YRNA-derived fragment
ccccccactgctaaatttgactggcttttta

SEQ ID NO: 24053 - DNA, 41 bp, Artificial Sequence
  synthetic circulating small noncoding RNA (sncRNA) 5' YRNA-derived fragment
aagttggtatacaaccccccactgctaaatttgactggctt

SEQ ID NO: 24054 - DNA, 29 bp, Artificial Sequence
  synthetic circulating small noncoding RNA (sncRNA) 5' YRNA-derived fragment
ttgtaaacaccactgcactcggaccagcc

SEQ ID NO: 24055 - DNA, 26 bp, Artificial Sequence
  synthetic circulating small noncoding RNA (sncRNA) 5' YRNA-derived fragment
gttctgataacccactaccatcggac

SEQ ID NO: 24056 - DNA, 30 bp, Artificial Sequence
  synthetic circulating small noncoding RNA (sncRNA) 5' YRNA-derived fragment
ttgagataactccctaccttcgggccagcc

SEQ ID NO: 24057 - DNA, 32 bp, Artificial Sequence
  synthetic circulating small noncoding RNA (sncRNA) 5' YRNA-derived fragment
cagccagtcaaatttagcagtggggggttgta

SEQ ID NO: 24058 - DNA, 27 bp, Artificial Sequence
  synthetic circulating small noncoding RNA (sncRNA) 5' YRNA-derived fragment
tagccagtcagattttagcagtggggg

SEQ ID NO: 24059 - DNA, 30 bp, Artificial Sequence
  synthetic circulating small noncoding RNA (sncRNA) 5' YRNA-derived fragment
cctcccactgctaaatttgactggcttatt

SEQ ID NO: 24060 - DNA, 33 bp, Artificial Sequence
  synthetic circulating small noncoding RNA (sncRNA) 5' YRNA-derived fragment
ggctggtcagatggtagtgggttatcagaactt

SEQ ID NO: 24061 - DNA, 31 bp, Artificial Sequence
  synthetic circulating small noncoding RNA (sncRNA) 5' YRNA-derived fragment
gttggtccgagtgttgtgggttattgttaag

SEQ ID NO: 24062 - DNA, 31 bp, Artificial Sequence
  synthetic circulating small noncoding RNA (sncRNA) 5' YRNA-derived fragment
ggtggtccaatggtagtgggttatcagaact

SEQ ID NO: 24063 - DNA, 44 bp, Artificial Sequence
  synthetic circulating small noncoding RNA (sncRNA) 5' YRNA-derived fragment
taaagttggtatacaaccccccactgctaaatttgactggcttt

SEQ ID NO: 24064 - DNA, 28 bp, Artificial Sequence
  synthetic circulating small noncoding RNA (sncRNA) 5' YRNA-derived fragment
cactcccactgcttcacttgactagcct

SEQ ID NO: 24065 - DNA, 39 bp, Artificial Sequence
  synthetic circulating small noncoding RNA (sncRNA) 5' YRNA-derived fragment
attaataagttctgataacccactaccatcgaaccagcc

SEQ ID NO: 24066 - DNA, 28 bp, Artificial Sequence
  synthetic circulating small noncoding RNA (sncRNA) 5' YRNA-derived fragment
taaaccagtcaaatttagcagtgggggg

SEQ ID NO: 24067 - DNA, 27 bp, Artificial Sequence
  synthetic circulating small noncoding RNA (sncRNA) 5' YRNA-derived fragment
tagccagtcaaatttagcagttggggg

SEQ ID NO: 24068 - DNA, 18 bp, Artificial Sequence
  synthetic circulating small noncoding RNA (sncRNA) 5' YRNA-derived fragment
agttctgataacccacca

SEQ ID NO: 24069 - DNA, 33 bp, Artificial Sequence
  synthetic circulating small noncoding RNA (sncRNA) 5' YRNA-derived fragment
ggctggtcctatggtagtgggttatcagaactt

SEQ ID NO: 24070 - DNA, 28 bp, Artificial Sequence
  synthetic circulating small noncoding RNA (sncRNA) 5' YRNA-derived fragment
aaaaccagtcaaatttagcagtaggggg

SEQ ID NO: 24071 - DNA, 29 bp, Artificial Sequence
  synthetic circulating small noncoding RNA (sncRNA) 5' YRNA-derived fragment
attgagataactcactaccttcggaccag

SEQ ID NO: 24072 - DNA, 37 bp, Artificial Sequence
  synthetic circulating small noncoding RNA (sncRNA) 5' YRNA-derived fragment
taatgagttctgataacccactaccatcggaccagcc

SEQ ID NO: 24073 - DNA, 21 bp, Artificial Sequence
  synthetic circulating small noncoding RNA (sncRNA) 5' YRNA-derived fragment
cacaaccgcgcttgactagct

SEQ ID NO: 24074 - DNA, 36 bp, Artificial Sequence
  synthetic circulating small noncoding RNA (sncRNA) 5' YRNA-derived fragment
aataagttctgataacccactaccattggacaagcc

SEQ ID NO: 24075 - DNA, 20 bp, Artificial Sequence
  synthetic circulating small noncoding RNA (sncRNA) 5' YRNA-derived fragment
gtagtgggttatcagaactt

SEQ ID NO: 24076 - DNA, 27 bp, Artificial Sequence
  synthetic circulating small noncoding RNA (sncRNA) 5' YRNA-derived fragment
ctcccactgcttcacttgactagccta

SEQ ID NO: 24077 - DNA, 25 bp, Artificial Sequence
  synthetic circulating small noncoding RNA (sncRNA) 5' YRNA-derived fragment
ataacccactaccatcggaccagcc

SEQ ID NO: 24078 - DNA, 42 bp, Artificial Sequence
  synthetic circulating small noncoding RNA (sncRNA) 5' YRNA-derived fragment
ggctggtccgatggtagtgggttatcagaacttattaacatt

SEQ ID NO: 24079 - DNA, 36 bp, Artificial Sequence
  synthetic circulating small noncoding RNA (sncRNA) 5' YRNA-derived fragment
aatgagttctgataacccactaccatcggaccagcc

SEQ ID NO: 24080 - DNA, 38 bp, Artificial Sequence
  synthetic circulating small noncoding RNA (sncRNA) 5' YRNA-derived fragment
ttggtatacaaccccccactgctaaatttgactggctt

SEQ ID NO: 24081 - DNA, 26 bp, Artificial Sequence
  synthetic circulating small noncoding RNA (sncRNA) 5' YRNA-derived fragment
ccccaactgctaaatttgactggctt

SEQ ID NO: 24082 - DNA, 26 bp, Artificial Sequence
  synthetic circulating small noncoding RNA (sncRNA) 5' YRNA-derived fragment
cacaaccgcgcttgactagcttgctg

SEQ ID NO: 24083 - DNA, 21 bp, Artificial Sequence
  synthetic circulating small noncoding RNA (sncRNA) 5' YRNA-derived fragment
cccacaaccgcgcttgactag

SEQ ID NO: 24084 - DNA, 33 bp, Artificial Sequence
  synthetic circulating small noncoding RNA (sncRNA) 5' YRNA-derived fragment
aagttctgataacctactaccatcggaccagcc

SEQ ID NO: 24085 - DNA, 33 bp, Artificial Sequence
  synthetic circulating small noncoding RNA (sncRNA) 5' YRNA-derived fragment
aagttctgataacccactactatcggaccagcc

SEQ ID NO: 24086 - DNA, 29 bp, Artificial Sequence
  synthetic circulating small noncoding RNA (sncRNA) 5' YRNA-derived fragment
accccccactgctaaatttgactggcttt

SEQ ID NO: 24087 - DNA, 19 bp, Artificial Sequence
  synthetic circulating small noncoding RNA (sncRNA) 5' YRNA-derived fragment
tagtgggttatcagaactt

SEQ ID NO: 24088 - DNA, 37 bp, Artificial Sequence
  synthetic circulating small noncoding RNA (sncRNA) 5' YRNA-derived fragment
ggctggtccgatggtagtgatttatcagaacttatta

SEQ ID NO: 24089 - DNA, 40 bp, Artificial Sequence
  synthetic circulating small noncoding RNA (sncRNA) 5' YRNA-derived fragment
tattaataagttctgataacccactaccatcagaccagcc

SEQ ID NO: 24090 - DNA, 34 bp, Artificial Sequence
  synthetic circulating small noncoding RNA (sncRNA) 5' YRNA-derived fragment
atacaaccccccactgctaaatttgactggcttt

SEQ ID NO: 24091 - DNA, 31 bp, Artificial Sequence
  synthetic circulating small noncoding RNA (sncRNA) 5' YRNA-derived fragment
ggctggtccgaatgtagtgagttatctcaat

SEQ ID NO: 24092 - DNA, 22 bp, Artificial Sequence
  synthetic circulating small noncoding RNA (sncRNA) 5' YRNA-derived fragment
cagtcaaatttagcagtggggg

SEQ ID NO: 24093 - DNA, 43 bp, Artificial Sequence
  synthetic circulating small noncoding RNA (sncRNA) 5' YRNA-derived fragment
ggctggtccgatggtagtgggttatcagaacttattaacatta

SEQ ID NO: 24094 - DNA, 25 bp, Artificial Sequence
  synthetic circulating small noncoding RNA (sncRNA) 5' YRNA-derived fragment
acaaccgcgcttgactagcttgctg

SEQ ID NO: 24095 - DNA, 23 bp, Artificial Sequence
  synthetic circulating small noncoding RNA (sncRNA) 5' YRNA-derived fragment
ccccacaaccgcgcttgactagc

SEQ ID NO: 24096 - DNA, 32 bp, Artificial Sequence
  synthetic circulating small noncoding RNA (sncRNA) 5' YRNA-derived fragment
gtttggtccaatggtagtgggttatcagaact

SEQ ID NO: 24097 - DNA, 26 bp, Artificial Sequence
  synthetic circulating small noncoding RNA (sncRNA) 5' YRNA-derived fragment
cgcccactgcttcacttgactagcct

SEQ ID NO: 24098 - DNA, 33 bp, Artificial Sequence
  synthetic circulating small noncoding RNA (sncRNA) 5' YRNA-derived fragment
tctccactcccactgcttcacttgactagcctt

SEQ ID NO: 24099 - DNA, 36 bp, Artificial Sequence
  synthetic circulating small noncoding RNA (sncRNA) 5' YRNA-derived fragment
aataagttctgataacccactaccatccgacaagcc

SEQ ID NO: 24100 - DNA, 23 bp, Artificial Sequence
  synthetic circulating small noncoding RNA (sncRNA) 5' YRNA-derived fragment
ctagtcaagtgtagtagtgagaa

SEQ ID NO: 24101 - DNA, 19 bp, Artificial Sequence
  synthetic circulating small noncoding RNA (sncRNA) 5' YRNA-derived fragment
agttctgataaccccctac

SEQ ID NO: 24102 - DNA, 27 bp, Artificial Sequence
  synthetic circulating small noncoding RNA (sncRNA) 5' YRNA-derived fragment
gctggtccgatggtagtgggttatcag

SEQ ID NO: 24103 - DNA, 37 bp, Artificial Sequence
  synthetic circulating small noncoding RNA (sncRNA) 5' YRNA-derived fragment
agttggtccgagtgttgtgggttattgttaagttgat

SEQ ID NO: 24104 - DNA, 32 bp, Artificial Sequence
  synthetic circulating small noncoding RNA (sncRNA) 5' YRNA-derived fragment
tgttttgataacccactaccatcagaccagcc

SEQ ID NO: 24105 - DNA, 28 bp, Artificial Sequence
  synthetic circulating small noncoding RNA (sncRNA) 5' YRNA-derived fragment
ctgacaacccactaccatcggaccagcc

SEQ ID NO: 24106 - DNA, 26 bp, Artificial Sequence
  synthetic circulating small noncoding RNA (sncRNA) 5' YRNA-derived fragment
cttctcactactgcacttgactagtc

SEQ ID NO: 24107 - DNA, 28 bp, Artificial Sequence
  synthetic circulating small noncoding RNA (sncRNA) 5' YRNA-derived fragment
ttagtgacactaatgttaataagttctg

SEQ ID NO: 24108 - DNA, 28 bp, Artificial Sequence
  synthetic circulating small noncoding RNA (sncRNA) 5' YRNA-derived fragment
gctggtccgatggtagtgggttatcaga

SEQ ID NO: 24109 - DNA, 34 bp, Artificial Sequence
  synthetic circulating small noncoding RNA (sncRNA) 5' YRNA-derived fragment
taatttctgataacccactaccatcggaccagcc

SEQ ID NO: 24110 - DNA, 28 bp, Artificial Sequence
  synthetic circulating small noncoding RNA (sncRNA) 5' YRNA-derived fragment
gttggtccgagtgttgtgggttattgtt

SEQ ID NO: 24111 - DNA, 28 bp, Artificial Sequence
  synthetic circulating small noncoding RNA (sncRNA) 5' YRNA-derived fragment
cccccaactgctaaatttgactggcttt

SEQ ID NO: 24112 - DNA, 26 bp, Artificial Sequence
  synthetic circulating small noncoding RNA (sncRNA) 5' YRNA-derived fragment
gataacccactaccatcggaccagtc

SEQ ID NO: 24113 - DNA, 20 bp, Artificial Sequence
  synthetic circulating small noncoding RNA (sncRNA) 5' YRNA-derived fragment
tcccactgcttcacttgact

SEQ ID NO: 24114 - DNA, 28 bp, Artificial Sequence
  synthetic circulating small noncoding RNA (sncRNA) 5' YRNA-derived fragment
ctgataacccactaccatcggaccagtc

SEQ ID NO: 24115 - DNA, 18 bp, Artificial Sequence
  synthetic circulating small noncoding RNA (sncRNA) 5' YRNA-derived fragment
agttctgataaccaacta

SEQ ID NO: 24116 - DNA, 22 bp, Artificial Sequence
  synthetic circulating small noncoding RNA (sncRNA) 5' YRNA-derived fragment
gttctgataacccactaccatc

SEQ ID NO: 24117 - DNA, 21 bp, Artificial Sequence
  synthetic circulating small noncoding RNA (sncRNA) 5' YRNA-derived fragment
cactgctaaatttgactggct

SEQ ID NO: 24118 - DNA, 24 bp, Artificial Sequence
  synthetic circulating small noncoding RNA (sncRNA) 5' YRNA-derived fragment
cccactgcttcacttgactagcct

SEQ ID NO: 24119 - DNA, 21 bp, Artificial Sequence
  synthetic circulating small noncoding RNA (sncRNA) 5' YRNA-derived fragment
ctcccactgcttcacttgact

SEQ ID NO: 24120 - DNA, 33 bp, Artificial Sequence
  synthetic circulating small noncoding RNA (sncRNA) 5' YRNA-derived fragment
gttggtccgagtgttgtgggttattgttaagtt

SEQ ID NO: 24121 - DNA, 28 bp, Artificial Sequence
  synthetic circulating small noncoding RNA (sncRNA) 5' YRNA-derived fragment
caagccagtcaaatttagcagtggggtg

SEQ ID NO: 24122 - DNA, 22 bp, Artificial Sequence
  synthetic circulating small noncoding RNA (sncRNA) 5' YRNA-derived fragment
cttctcactactgcacttgact

SEQ ID NO: 24123 - DNA, 36 bp, Artificial Sequence
  synthetic circulating small noncoding RNA (sncRNA) 5' YRNA-derived fragment
gctggtccgatggtagtgggttatcagaacttatta

SEQ ID NO: 24124 - DNA, 29 bp, Artificial Sequence
  synthetic circulating small noncoding RNA (sncRNA) 5' YRNA-derived fragment
cactcccactgcttcacttgactagcctt

SEQ ID NO: 24125 - DNA, 27 bp, Artificial Sequence
  synthetic circulating small noncoding RNA (sncRNA) 5' YRNA-derived fragment
agataactcactaccttcggaccagcc

SEQ ID NO: 24126 - DNA, 41 bp, Artificial Sequence
  synthetic circulating small noncoding RNA (sncRNA) 5' YRNA-derived fragment
agttggtatacaaccccccactgctaaatttgactggcttt

SEQ ID NO: 24127 - DNA, 21 bp, Artificial Sequence
  synthetic circulating small noncoding RNA (sncRNA) 5' YRNA-derived fragment
ttctcactactgcacttgact

SEQ ID NO: 24128 - DNA, 23 bp, Artificial Sequence
  synthetic circulating small noncoding RNA (sncRNA) 5' YRNA-derived fragment
ttctcactactacacttgactag

SEQ ID NO: 24129 - DNA, 27 bp, Artificial Sequence
  synthetic circulating small noncoding RNA (sncRNA) 5' YRNA-derived fragment
cccccactgctaaatttgactggctta

SEQ ID NO: 24130 - DNA, 23 bp, Artificial Sequence
  synthetic circulating small noncoding RNA (sncRNA) 5' YRNA-derived fragment
gttctgataacccactaccatcg

SEQ ID NO: 24131 - DNA, 36 bp, Artificial Sequence
  synthetic circulating small noncoding RNA (sncRNA) 5' YRNA-derived fragment
ggctggtccgatggtagtgggttatcagaacttact

SEQ ID NO: 24132 - DNA, 26 bp, Artificial Sequence
  synthetic circulating small noncoding RNA (sncRNA) 5' YRNA-derived fragment
agactagtcaagtgcagtagtgagaa

SEQ ID NO: 24133 - DNA, 22 bp, Artificial Sequence
  synthetic circulating small noncoding RNA (sncRNA) 5' YRNA-derived fragment
agttctgataacccactaccat

SEQ ID NO: 24134 - DNA, 36 bp, Artificial Sequence
  synthetic circulating small noncoding RNA (sncRNA) 5' YRNA-derived fragment
ggctggtccgatggtagtgatttatcagaacttatt

SEQ ID NO: 24135 - DNA, 24 bp, Artificial Sequence
  synthetic circulating small noncoding RNA (sncRNA) 5' YRNA-derived fragment
actcccactgcttcacttgactag

SEQ ID NO: 24136 - DNA, 29 bp, Artificial Sequence
  synthetic circulating small noncoding RNA (sncRNA) 5' YRNA-derived fragment
ttctgataacccactaccatcggaccagc

SEQ ID NO: 24137 - DNA, 33 bp, Artificial Sequence
  synthetic circulating small noncoding RNA (sncRNA) 5' YRNA-derived fragment
aagttctgataacccactaccatcgaaccagcc

SEQ ID NO: 24138 - DNA, 29 bp, Artificial Sequence
  synthetic circulating small noncoding RNA (sncRNA) 5' YRNA-derived fragment
gttctgataacccactaccatcggaccag

SEQ ID NO: 24139 - DNA, 33 bp, Artificial Sequence
  synthetic circulating small noncoding RNA (sncRNA) 5' YRNA-derived fragment
aagttctgatgacccactaccatcggaccagcc

SEQ ID NO: 24140 - DNA, 23 bp, Artificial Sequence
  synthetic circulating small noncoding RNA (sncRNA) 5' YRNA-derived fragment
aagccagtcaaatttagcagtgg

SEQ ID NO: 24141 - DNA, 32 bp, Artificial Sequence
  synthetic circulating small noncoding RNA (sncRNA) 5' YRNA-derived fragment
gggtggtccaatggtagtgggttatcagaact

SEQ ID NO: 24142 - DNA, 24 bp, Artificial Sequence
  synthetic circulating small noncoding RNA (sncRNA) 5' YRNA-derived fragment
actagtcaagtgcagtagtgagaa

SEQ ID NO: 24143 - DNA, 28 bp, Artificial Sequence
  synthetic circulating small noncoding RNA (sncRNA) 5' YRNA-derived fragment
tgtctgatggtagtgggttatcagaact

SEQ ID NO: 24144 - DNA, 25 bp, Artificial Sequence
  synthetic circulating small noncoding RNA (sncRNA) 5' YRNA-derived fragment
accagtcaaatttagcagtgggggg

SEQ ID NO: 24145 - DNA, 32 bp, Artificial Sequence
  synthetic circulating small noncoding RNA (sncRNA) 5' YRNA-derived fragment
ggctagtctgatggtagtgggttatcagaatt

SEQ ID NO: 24146 - DNA, 37 bp, Artificial Sequence
  synthetic circulating small noncoding RNA (sncRNA) 5' YRNA-derived fragment
taataagttctgataacccactaccattggacaagcc

SEQ ID NO: 24147 - DNA, 24 bp, Artificial Sequence
  synthetic circulating small noncoding RNA (sncRNA) 5' YRNA-derived fragment
taacccactaccatcggaccagcc

SEQ ID NO: 24148 - DNA, 27 bp, Artificial Sequence
  synthetic circulating small noncoding RNA (sncRNA) 5' YRNA-derived fragment
agccagtcagattttagcagtgggggg

SEQ ID NO: 24149 - DNA, 33 bp, Artificial Sequence
  synthetic circulating small noncoding RNA (sncRNA) 5' YRNA-derived fragment
aaccagtcaaatttagcagtggggggttgtata

SEQ ID NO: 24150 - DNA, 30 bp, Artificial Sequence
  synthetic circulating small noncoding RNA (sncRNA) 5' YRNA-derived fragment
ggtggtccaatggtagtgggttatcagaac

SEQ ID NO: 24151 - DNA, 24 bp, Artificial Sequence
  synthetic circulating small noncoding RNA (sncRNA) 5' YRNA-derived fragment
gttctgataacccactaccatcgg

SEQ ID NO: 24152 - DNA, 24 bp, Artificial Sequence
  synthetic circulating small noncoding RNA (sncRNA) 5' YRNA-derived fragment
ctagtcaagtgtagtagtgagaag

SEQ ID NO: 24153 - DNA, 29 bp, Artificial Sequence
  synthetic circulating small noncoding RNA (sncRNA) 5' YRNA-derived fragment
cccccactgctaaatttgactggcttttt

SEQ ID NO: 24154 - DNA, 29 bp, Artificial Sequence
  synthetic circulating small noncoding RNA (sncRNA) 5' YRNA-derived fragment
ttaagccagtcaaatttagcagtgggggg

SEQ ID NO: 24155 - DNA, 24 bp, Artificial Sequence
  synthetic circulating small noncoding RNA (sncRNA) 5' YRNA-derived fragment
ccccactgctaaatttgactggct

SEQ ID NO: 24156 - DNA, 26 bp, Artificial Sequence
  synthetic circulating small noncoding RNA (sncRNA) 5' YRNA-derived fragment
ccgatggtagtgggttatcagaactt

SEQ ID NO: 24157 - DNA, 27 bp, Artificial Sequence
  synthetic circulating small noncoding RNA (sncRNA) 5' YRNA-derived fragment
aagacagtcaaatttagcagtggagag

SEQ ID NO: 24158 - DNA, 22 bp, Artificial Sequence
  synthetic circulating small noncoding RNA (sncRNA) 5' YRNA-derived fragment
cccacaaccgcgcttgactagc

SEQ ID NO: 24159 - DNA, 33 bp, Artificial Sequence
  synthetic circulating small noncoding RNA (sncRNA) 5' YRNA-derived fragment
tggtccgatggtagtgggttatcagaacttatt

SEQ ID NO: 24160 - DNA, 29 bp, Artificial Sequence
  synthetic circulating small noncoding RNA (sncRNA) 5' YRNA-derived fragment
cccccccactgctaaatttgactggcttt

SEQ ID NO: 24161 - DNA, 21 bp, Artificial Sequence
  synthetic circulating small noncoding RNA (sncRNA) 5' YRNA-derived fragment
gtcaaatttagcagtgggggg

SEQ ID NO: 24162 - DNA, 27 bp, Artificial Sequence
  synthetic circulating small noncoding RNA (sncRNA) 5' YRNA-derived fragment
ccccacactgccaaatttgactgtctt

SEQ ID NO: 24163 - DNA, 29 bp, Artificial Sequence
  synthetic circulating small noncoding RNA (sncRNA) 5' YRNA-derived fragment
ccactcccactgcttcacttgactagcct

SEQ ID NO: 24164 - DNA, 28 bp, Artificial Sequence
  synthetic circulating small noncoding RNA (sncRNA) 5' YRNA-derived fragment
ggtcctatggtagtgggttatcagaact

SEQ ID NO: 24165 - DNA, 32 bp, Artificial Sequence
  synthetic circulating small noncoding RNA (sncRNA) 5' YRNA-derived fragment
tggctggtccgatggtagtgggttatcagaac

SEQ ID NO: 24166 - DNA, 30 bp, Artificial Sequence
  synthetic circulating small noncoding RNA (sncRNA) 5' YRNA-derived fragment
tacaaccccccactgctaaatttgactggc

SEQ ID NO: 24167 - DNA, 43 bp, Artificial Sequence
  synthetic circulating small noncoding RNA (sncRNA) 5' YRNA-derived fragment
ggctggtccgatggtagtgggttatcagaacttattaacattt

SEQ ID NO: 24168 - DNA, 40 bp, Artificial Sequence
  synthetic circulating small noncoding RNA (sncRNA) 5' YRNA-derived fragment
ggctggtccgatggtagtgggttatcagaacttactaata

SEQ ID NO: 24169 - DNA, 19 bp, Artificial Sequence
  synthetic circulating small noncoding RNA (sncRNA) 5' YRNA-derived fragment
cccacaaccgcgcttgact

SEQ ID NO: 24170 - DNA, 26 bp, Artificial Sequence
  synthetic circulating small noncoding RNA (sncRNA) 5' YRNA-derived fragment
cccccacaaccgcgcttgactagctt

SEQ ID NO: 24171 - DNA, 25 bp, Artificial Sequence
  synthetic circulating small noncoding RNA (sncRNA) 5' YRNA-derived fragment
gatggtagtgggttatcagaactta

SEQ ID NO: 24172 - DNA, 34 bp, Artificial Sequence
  synthetic circulating small noncoding RNA (sncRNA) 5' YRNA-derived fragment
cagccagtcaaatttagcagtggggggttgtata

SEQ ID NO: 24173 - DNA, 20 bp, Artificial Sequence
  synthetic circulating small noncoding RNA (sncRNA) 5' YRNA-derived fragment
actgctaaatttgactggct

SEQ ID NO: 24174 - DNA, 38 bp, Artificial Sequence
  synthetic circulating small noncoding RNA (sncRNA) 5' YRNA-derived fragment
gctggtccgatggtagtgggttatcagaacttattaac

SEQ ID NO: 24175 - DNA, 34 bp, Artificial Sequence
  synthetic circulating small noncoding RNA (sncRNA) 5' YRNA-derived fragment
ggctggtccaatggtagtggtttatcagaactta

SEQ ID NO: 24176 - DNA, 34 bp, Artificial Sequence
  synthetic circulating small noncoding RNA (sncRNA) 5' YRNA-derived fragment
ttctccactcccactgcttcacttgactagcctt

SEQ ID NO: 24177 - DNA, 31 bp, Artificial Sequence
  synthetic circulating small noncoding RNA (sncRNA) 5' YRNA-derived fragment
agccagtcaaatttagcagtggggggttgta

SEQ ID NO: 24178 - DNA, 23 bp, Artificial Sequence
  synthetic circulating small noncoding RNA (sncRNA) 5' YRNA-derived fragment
ctagtcaagtgcagtagtgagca

SEQ ID NO: 24179 - DNA, 19 bp, Artificial Sequence
  synthetic circulating small noncoding RNA (sncRNA) 5' YRNA-derived fragment
tgctaaatttgactggctt

SEQ ID NO: 24180 - DNA, 19 bp, Artificial Sequence
  synthetic circulating small noncoding RNA (sncRNA) 5' YRNA-derived fragment
cactaccatcggaccagcc

SEQ ID NO: 24181 - DNA, 26 bp, Artificial Sequence
  synthetic circulating small noncoding RNA (sncRNA) 5' YRNA-derived fragment
tttcagtcaaatttagcagtgggggg

SEQ ID NO: 24182 - DNA, 32 bp, Artificial Sequence
  synthetic circulating small noncoding RNA (sncRNA) 5' YRNA-derived fragment
aataagttctgataacccactaccatcggacc

SEQ ID NO: 24183 - DNA, 45 bp, Artificial Sequence
  synthetic circulating small noncoding RNA (sncRNA) 5' YRNA-derived fragment
ggctggtccgatggtagtgggttatcagaacttattaacattagt

SEQ ID NO: 24184 - DNA, 28 bp, Artificial Sequence
  synthetic circulating small noncoding RNA (sncRNA) 5' YRNA-derived fragment
ggtcagatggtagtgggttatcagaact

SEQ ID NO: 24185 - DNA, 32 bp, Artificial Sequence
  synthetic circulating small noncoding RNA (sncRNA) 5' YRNA-derived fragment
ggctggtctgatggtagtgggttatcagtggt

SEQ ID NO: 24186 - DNA, 31 bp, Artificial Sequence
  synthetic circulating small noncoding RNA (sncRNA) 5' YRNA-derived fragment
ctccactcccactgcttcacttgactagcct

SEQ ID NO: 24187 - DNA, 37 bp, Artificial Sequence
  synthetic circulating small noncoding RNA (sncRNA) 5' YRNA-derived fragment
taataagttctgataacccactaccatccgacaagcc

SEQ ID NO: 24188 - DNA, 35 bp, Artificial Sequence
  synthetic circulating small noncoding RNA (sncRNA) 5' YRNA-derived fragment
ggctggtccgatggtagtgggttaccagaacttaa

SEQ ID NO: 24189 - DNA, 28 bp, Artificial Sequence
  synthetic circulating small noncoding RNA (sncRNA) 5' YRNA-derived fragment
aaaagccagtcaaatttagcagtggggg

SEQ ID NO: 24190 - DNA, 38 bp, Artificial Sequence
  synthetic circulating small noncoding RNA (sncRNA) 5' YRNA-derived fragment
acaatcaattgagataactcactaccttcggaccagcc

SEQ ID NO: 24191 - DNA, 33 bp, Artificial Sequence
  synthetic circulating small noncoding RNA (sncRNA) 5' YRNA-derived fragment
ggtccgatggtagtgggttatcagaacttatta

SEQ ID NO: 24192 - DNA, 38 bp, Artificial Sequence
  synthetic circulating small noncoding RNA (sncRNA) 5' YRNA-derived fragment
agttggtccgagtgttgtgggttattgttaagttgatt

SEQ ID NO: 24193 - DNA, 25 bp, Artificial Sequence
  synthetic circulating small noncoding RNA (sncRNA) 5' YRNA-derived fragment
ctgatggtagtgggttatcagaact

SEQ ID NO: 24194 - DNA, 21 bp, Artificial Sequence
  synthetic circulating small noncoding RNA (sncRNA) 5' YRNA-derived fragment
agttctgataacccactacca

SEQ ID NO: 24195 - DNA, 28 bp, Artificial Sequence
  synthetic circulating small noncoding RNA (sncRNA) 5' YRNA-derived fragment
ccccccactgctaaattttactagcttt

SEQ ID NO: 24196 - DNA, 45 bp, Artificial Sequence
  synthetic circulating small noncoding RNA (sncRNA) 5' YRNA-derived fragment
ctaaagttggtatacaaccccccactgctaaatttgactggcttt

SEQ ID NO: 24197 - DNA, 21 bp, Artificial Sequence
  synthetic circulating small noncoding RNA (sncRNA) 5' YRNA-derived fragment
taacattagtgtcactaaagt

SEQ ID NO: 24198 - DNA, 27 bp, Artificial Sequence
  synthetic circulating small noncoding RNA (sncRNA) 5' YRNA-derived fragment
aagccagccaaatttcgcagtgggggg

SEQ ID NO: 24199 - DNA, 27 bp, Artificial Sequence
  synthetic circulating small noncoding RNA (sncRNA) 5' YRNA-derived fragment
cgcccactgcttcacttgactagcctt

SEQ ID NO: 24200 - DNA, 27 bp, Artificial Sequence
  synthetic circulating small noncoding RNA (sncRNA) 5' YRNA-derived fragment
taagccagtcaaatttagcagtggggg

SEQ ID NO: 24201 - DNA, 27 bp, Artificial Sequence
  synthetic circulating small noncoding RNA (sncRNA) 5' YRNA-derived fragment
ccccccacaactaaatttgactggctt

SEQ ID NO: 24202 - DNA, 29 bp, Artificial Sequence
  synthetic circulating small noncoding RNA (sncRNA) 5' YRNA-derived fragment
caaccccccactgctaaatttgactggct

SEQ ID NO: 24203 - DNA, 25 bp, Artificial Sequence
  synthetic circulating small noncoding RNA (sncRNA) 5' YRNA-derived fragment
atttctgataacccactaccatcgg

SEQ ID NO: 24204 - DNA, 28 bp, Artificial Sequence
  synthetic circulating small noncoding RNA (sncRNA) 5' YRNA-derived fragment
aaaggcagtcaaatttagcagtgtgggg

SEQ ID NO: 24205 - DNA, 23 bp, Artificial Sequence
  synthetic circulating small noncoding RNA (sncRNA) 5' YRNA-derived fragment
gtagtgggttatcagaacttatt

SEQ ID NO: 24206 - DNA, 22 bp, Artificial Sequence
  synthetic circulating small noncoding RNA (sncRNA) 5' YRNA-derived fragment
aataagttctgataacccacta

SEQ ID NO: 24207 - DNA, 32 bp, Artificial Sequence
  synthetic circulating small noncoding RNA (sncRNA) 5' YRNA-derived fragment
tatacaaccccccactgctaaatttgactggc

SEQ ID NO: 24208 - DNA, 19 bp, Artificial Sequence
  synthetic circulating small noncoding RNA (sncRNA) 5' YRNA-derived fragment
tgttgtgggttattgttaa

SEQ ID NO: 24209 - DNA, 23 bp, Artificial Sequence
  synthetic circulating small noncoding RNA (sncRNA) 5' YRNA-derived fragment
tatggtagtgggttatcagaact

SEQ ID NO: 24210 - DNA, 35 bp, Artificial Sequence
  synthetic circulating small noncoding RNA (sncRNA) 5' YRNA-derived fragment
atcaattgagataactcactaccttcggaccagcc

SEQ ID NO: 24211 - DNA, 26 bp, Artificial Sequence
  synthetic circulating small noncoding RNA (sncRNA) 5' YRNA-derived fragment
gacaacccactaccatcggaccagcc

SEQ ID NO: 24212 - DNA, 32 bp, Artificial Sequence
  synthetic circulating small noncoding RNA (sncRNA) 5' YRNA-derived fragment
ggctggtccgaaggtagtgaattatctcaatt

SEQ ID NO: 24213 - DNA, 33 bp, Artificial Sequence
  synthetic circulating small noncoding RNA (sncRNA) 5' YRNA-derived fragment
ggctggtccgatggtagcaggttatcagaactt

SEQ ID NO: 24214 - DNA, 22 bp, Artificial Sequence
  synthetic circulating small noncoding RNA (sncRNA) 5' YRNA-derived fragment
actcccactgcttcacttgact

SEQ ID NO: 24215 - DNA, 24 bp, Artificial Sequence
  synthetic circulating small noncoding RNA (sncRNA) 5' YRNA-derived fragment
gatggtagtgggttatcagaactt

SEQ ID NO: 24216 - DNA, 46 bp, Artificial Sequence
  synthetic circulating small noncoding RNA (sncRNA) 5' YRNA-derived fragment
agttggtccgagtgttgtgggttattgttaagttgatttaacattg

SEQ ID NO: 24217 - DNA, 27 bp, Artificial Sequence
  synthetic circulating small noncoding RNA (sncRNA) 5' YRNA-derived fragment
gtcctatggtagtgggttatcagaact

SEQ ID NO: 24218 - DNA, 28 bp, Artificial Sequence
  synthetic circulating small noncoding RNA (sncRNA) 5' YRNA-derived fragment
ctggtccgatggtagtgggttatcagaa

SEQ ID NO: 24219 - DNA, 27 bp, Artificial Sequence
  synthetic circulating small noncoding RNA (sncRNA) 5' YRNA-derived fragment
cccccaactactaaatttgactggctt

SEQ ID NO: 24220 - DNA, 25 bp, Artificial Sequence
  synthetic circulating small noncoding RNA (sncRNA) 5' YRNA-derived fragment
ggctggtccgagtgcagtggtgttt

SEQ ID NO: 24221 - DNA, 26 bp, Artificial Sequence
  synthetic circulating small noncoding RNA (sncRNA) 5' YRNA-derived fragment
aaggctagtcaagtgaagcagtggga

SEQ ID NO: 24222 - DNA, 34 bp, Artificial Sequence
  synthetic circulating small noncoding RNA (sncRNA) 5' YRNA-derived fragment
taagttctgataacccactaccattggacaagcc

SEQ ID NO: 24223 - DNA, 20 bp, Artificial Sequence
  synthetic circulating small noncoding RNA (sncRNA) 5' YRNA-derived fragment
cactgctaaatttgactggc

SEQ ID NO: 24224 - DNA, 33 bp, Artificial Sequence
  synthetic circulating small noncoding RNA (sncRNA) 5' YRNA-derived fragment
gctggtccgatggtagtgggttatcagaactta

SEQ ID NO: 24225 - DNA, 24 bp, Artificial Sequence
  synthetic circulating small noncoding RNA (sncRNA) 5' YRNA-derived fragment
gccagtcaaatttagcagtggggg

SEQ ID NO: 24226 - DNA, 25 bp, Artificial Sequence
  synthetic circulating small noncoding RNA (sncRNA) 5' YRNA-derived fragment
actagtcaagtgcagtagtgagaag

SEQ ID NO: 24227 - DNA, 30 bp, Artificial Sequence
  synthetic circulating small noncoding RNA (sncRNA) 5' YRNA-derived fragment
tttaagccagtcaaatttagcagtgggggg

SEQ ID NO: 24228 - DNA, 24 bp, Artificial Sequence
  synthetic circulating small noncoding RNA (sncRNA) 5' YRNA-derived fragment
ggctggtccgagtgcagtggtgtt

SEQ ID NO: 24229 - DNA, 27 bp, Artificial Sequence
  synthetic circulating small noncoding RNA (sncRNA) 5' YRNA-derived fragment
tccgatggtagtgggttatcagaactt

SEQ ID NO: 24230 - DNA, 32 bp, Artificial Sequence
  synthetic circulating small noncoding RNA (sncRNA) 5' YRNA-derived fragment
aattgagataactcactacctttggacaagcc

SEQ ID NO: 24231 - DNA, 21 bp, Artificial Sequence
  synthetic circulating small noncoding RNA (sncRNA) 5' YRNA-derived fragment
taacaataacccacaacactc

SEQ ID NO: 24232 - DNA, 26 bp, Artificial Sequence
  synthetic circulating small noncoding RNA (sncRNA) 5' YRNA-derived fragment
cccccattgctaaatttgactggctt

SEQ ID NO: 24233 - DNA, 22 bp, Artificial Sequence
  synthetic circulating small noncoding RNA (sncRNA) 5' YRNA-derived fragment
actcactaccttcggaccagcc

SEQ ID NO: 24234 - DNA, 30 bp, Artificial Sequence
  synthetic circulating small noncoding RNA (sncRNA) 5' YRNA-derived fragment
ccactcccactgcttcacttgactagcctt

SEQ ID NO: 24235 - DNA, 25 bp, Artificial Sequence
  synthetic circulating small noncoding RNA (sncRNA) 5' YRNA-derived fragment
ttctcactactgcacttgactagtc

SEQ ID NO: 24236 - DNA, 30 bp, Artificial Sequence
  synthetic circulating small noncoding RNA (sncRNA) 5' YRNA-derived fragment
ggctggtctgagggtagtgagttatctcaa

SEQ ID NO: 24237 - DNA, 27 bp, Artificial Sequence
  synthetic circulating small noncoding RNA (sncRNA) 5' YRNA-derived fragment
gatggtagtgggttatcagaacttatt

SEQ ID NO: 24238 - DNA, 22 bp, Artificial Sequence
  synthetic circulating small noncoding RNA (sncRNA) 5' YRNA-derived fragment
cgagtgttgtgggttattgtta

SEQ ID NO: 24239 - DNA, 27 bp, Artificial Sequence
  synthetic circulating small noncoding RNA (sncRNA) 5' YRNA-derived fragment
cccccacaaccgcgcttgactagcttg

SEQ ID NO: 24240 - DNA, 24 bp, Artificial Sequence
  synthetic circulating small noncoding RNA (sncRNA) 5' YRNA-derived fragment
accccccactgctaaatttgactg

SEQ ID NO: 24241 - DNA, 43 bp, Artificial Sequence
  synthetic circulating small noncoding RNA (sncRNA) 5' YRNA-derived fragment
aaagttggtatacaaccccccactgctaaatttgactggcttt

SEQ ID NO: 24242 - DNA, 30 bp, Artificial Sequence
  synthetic circulating small noncoding RNA (sncRNA) 5' YRNA-derived fragment
taagttctgataacccactaccatcggacc

SEQ ID NO: 24243 - DNA, 24 bp, Artificial Sequence
  synthetic circulating small noncoding RNA (sncRNA) 5' YRNA-derived fragment
ctcccactgcttcacttgactagc

SEQ ID NO: 24244 - DNA, 27 bp, Artificial Sequence
  synthetic circulating small noncoding RNA (sncRNA) 5' YRNA-derived fragment
ttctcactactgcacttgactagtctt

SEQ ID NO: 24245 - DNA, 34 bp, Artificial Sequence
  synthetic circulating small noncoding RNA (sncRNA) 5' YRNA-derived fragment
taagctctgacaacccactaccatcggaccagcc

SEQ ID NO: 24246 - DNA, 23 bp, Artificial Sequence
  synthetic circulating small noncoding RNA (sncRNA) 5' YRNA-derived fragment
cactgctaaatttgactggcttt

SEQ ID NO: 24247 - DNA, 24 bp, Artificial Sequence
  synthetic circulating small noncoding RNA (sncRNA) 5' YRNA-derived fragment
cttctcactactacacttgactag

SEQ ID NO: 24248 - DNA, 30 bp, Artificial Sequence
  synthetic circulating small noncoding RNA (sncRNA) 5' YRNA-derived fragment
gactggtccgaaggtagtgagttatctcag

SEQ ID NO: 24249 - DNA, 21 bp, Artificial Sequence
  synthetic circulating small noncoding RNA (sncRNA) 5' YRNA-derived fragment
cgagtgttgtgggttattgtt

SEQ ID NO: 24250 - DNA, 28 bp, Artificial Sequence
  synthetic circulating small noncoding RNA (sncRNA) 5' YRNA-derived fragment
agttctgataacccactaccatcgaacc

SEQ ID NO: 24251 - DNA, 25 bp, Artificial Sequence
  synthetic circulating small noncoding RNA (sncRNA) 5' YRNA-derived fragment
gttggtccgagtgttgtgggttatt

SEQ ID NO: 24252 - DNA, 42 bp, Artificial Sequence
  synthetic circulating small noncoding RNA (sncRNA) 5' YRNA-derived fragment
ggctggtcctatggtagtgggttatcagaacttattaacttt

SEQ ID NO: 24253 - DNA, 26 bp, Artificial Sequence
  synthetic circulating small noncoding RNA (sncRNA) 5' YRNA-derived fragment
gactggtccgaaggtagtgagttatc

SEQ ID NO: 24254 - DNA, 23 bp, Artificial Sequence
  synthetic circulating small noncoding RNA (sncRNA) 5' YRNA-derived fragment
ccccactgctaaatttgactggc

SEQ ID NO: 24255 - DNA, 32 bp, Artificial Sequence
  synthetic circulating small noncoding RNA (sncRNA) 5' YRNA-derived fragment
ctccactcccactgcttcacttgactagcctt

SEQ ID NO: 24256 - DNA, 36 bp, Artificial Sequence
  synthetic circulating small noncoding RNA (sncRNA) 5' YRNA-derived fragment
ggctggtccgatggtagcgggttatcagaacctatt

SEQ ID NO: 24257 - DNA, 21 bp, Artificial Sequence
  synthetic circulating small noncoding RNA (sncRNA) 5' YRNA-derived fragment
ggctggtccgatggtagtggg

SEQ ID NO: 24258 - DNA, 26 bp, Artificial Sequence
  synthetic circulating small noncoding RNA (sncRNA) 5' YRNA-derived fragment
ccccactgctaaatttgactggcttt

SEQ ID NO: 24259 - DNA, 26 bp, Artificial Sequence
  synthetic circulating small noncoding RNA (sncRNA) 5' YRNA-derived fragment
aagccagtcaaatttatcagaggggg

SEQ ID NO: 24260 - DNA, 20 bp, Artificial Sequence
  synthetic circulating small noncoding RNA (sncRNA) 5' YRNA-derived fragment
aagttctgataacccactac

SEQ ID NO: 24261 - DNA, 19 bp, Artificial Sequence
  synthetic circulating small noncoding RNA (sncRNA) 5' YRNA-derived fragment
ggtagtgggttatcagaac

SEQ ID NO: 24262 - DNA, 21 bp, Artificial Sequence
  synthetic circulating small noncoding RNA (sncRNA) 5' YRNA-derived fragment
ttaacaataacccacaacact

SEQ ID NO: 24263 - DNA, 29 bp, Artificial Sequence
  synthetic circulating small noncoding RNA (sncRNA) 5' YRNA-derived fragment
aaccccccactgctaaatttgactggctt

SEQ ID NO: 24264 - DNA, 26 bp, Artificial Sequence
  synthetic circulating small noncoding RNA (sncRNA) 5' YRNA-derived fragment
agccagtaaaatttagcagtggggag

SEQ ID NO: 24265 - DNA, 27 bp, Artificial Sequence
  synthetic circulating small noncoding RNA (sncRNA) 5' YRNA-derived fragment
aaggcagtcaaatttagcagtgggggt

SEQ ID NO: 24266 - DNA, 36 bp, Artificial Sequence
  synthetic circulating small noncoding RNA (sncRNA) 5' YRNA-derived fragment
ggctggtcagatggtagtgggttatcagaacttatt

SEQ ID NO: 24267 - DNA, 36 bp, Artificial Sequence
  synthetic circulating small noncoding RNA (sncRNA) 5' YRNA-derived fragment
aataagttctgataacctactaccatcggaccagcc

SEQ ID NO: 24268 - DNA, 19 bp, Artificial Sequence
  synthetic circulating small noncoding RNA (sncRNA) 5' YRNA-derived fragment
acattagtgtcactaaagt

SEQ ID NO: 24269 - DNA, 32 bp, Artificial Sequence
  synthetic circulating small noncoding RNA (sncRNA) 5' YRNA-derived fragment
gttggtccgagtgttgtgggttattgttaagt

SEQ ID NO: 24270 - DNA, 25 bp, Artificial Sequence
  synthetic circulating small noncoding RNA (sncRNA) 5' YRNA-derived fragment
agttctgataacccactaccatccg

SEQ ID NO: 24271 - DNA, 19 bp, Artificial Sequence
  synthetic circulating small noncoding RNA (sncRNA) 5' YRNA-derived fragment
aagttctgataacccacta

SEQ ID NO: 24272 - DNA, 30 bp, Artificial Sequence
  synthetic circulating small noncoding RNA (sncRNA) 5' YRNA-derived fragment
aagttctgataacccactaccatcggacca

SEQ ID NO: 24273 - DNA, 20 bp, Artificial Sequence
  synthetic circulating small noncoding RNA (sncRNA) 5' YRNA-derived fragment
agtcaagtgaagcagtggga

SEQ ID NO: 24274 - DNA, 25 bp, Artificial Sequence
  synthetic circulating small noncoding RNA (sncRNA) 5' YRNA-derived fragment
cgatggtagtgggttatcagaactt

SEQ ID NO: 24275 - DNA, 19 bp, Artificial Sequence
  synthetic circulating small noncoding RNA (sncRNA) 5' YRNA-derived fragment
actgctaaatttgactggc

SEQ ID NO: 24276 - DNA, 20 bp, Artificial Sequence
  synthetic circulating small noncoding RNA (sncRNA) 5' YRNA-derived fragment
actttagtgacactaatgtt

SEQ ID NO: 24277 - DNA, 20 bp, Artificial Sequence
  synthetic circulating small noncoding RNA (sncRNA) 5' YRNA-derived fragment
cgagtgttgtgggttattgt

SEQ ID NO: 24278 - DNA, 23 bp, Artificial Sequence
  synthetic circulating small noncoding RNA (sncRNA) 5' YRNA-derived fragment
cgcccactgcttcacttgactag

SEQ ID NO: 24279 - DNA, 36 bp, Artificial Sequence
  synthetic circulating small noncoding RNA (sncRNA) 5' YRNA-derived fragment
ggctggtcctatggtagtgggttatcagaacttatt

SEQ ID NO: 24280 - DNA, 22 bp, Artificial Sequence
  synthetic circulating small noncoding RNA (sncRNA) 5' YRNA-derived fragment
actgctaaatttgactggcttt

SEQ ID NO: 24281 - DNA, 28 bp, Artificial Sequence
  synthetic circulating small noncoding RNA (sncRNA) 5' YRNA-derived fragment
cttctcactactgcacttgactagtctt

SEQ ID NO: 24282 - DNA, 25 bp, Artificial Sequence
  synthetic circulating small noncoding RNA (sncRNA) 5' YRNA-derived fragment
ccgatggtagtgatttatcagaact

SEQ ID NO: 24283 - DNA, 30 bp, Artificial Sequence
  synthetic circulating small noncoding RNA (sncRNA) 5' YRNA-derived fragment
accagtcaaatttagcagtggggggttgta

SEQ ID NO: 24284 - DNA, 26 bp, Artificial Sequence
  synthetic circulating small noncoding RNA (sncRNA) 5' YRNA-derived fragment
agccattcaaatttagcagtgggggg

SEQ ID NO: 24285 - DNA, 21 bp, Artificial Sequence
  synthetic circulating small noncoding RNA (sncRNA) 5' YRNA-derived fragment
agttggtccgagtgttgtggg

SEQ ID NO: 24286 - DNA, 25 bp, Artificial Sequence
  synthetic circulating small noncoding RNA (sncRNA) 5' YRNA-derived fragment
gttctgataacccactaccatcgga

SEQ ID NO: 24287 - DNA, 29 bp, Artificial Sequence
  synthetic circulating small noncoding RNA (sncRNA) 5' YRNA-derived fragment
ccccacaaccgcgcttgactagcttgctg

SEQ ID NO: 24288 - DNA, 30 bp, Artificial Sequence
  synthetic circulating small noncoding RNA (sncRNA) 5' YRNA-derived fragment
ggctggtcagaaggtagtgagttatctcaa

SEQ ID NO: 24289 - DNA, 28 bp, Artificial Sequence
  synthetic circulating small noncoding RNA (sncRNA) 5' YRNA-derived fragment
agttctgataacccactaccatccgaca

SEQ ID NO: 24290 - DNA, 25 bp, Artificial Sequence
  synthetic circulating small noncoding RNA (sncRNA) 5' YRNA-derived fragment
gagtgttgtgggttattgttaagtt

SEQ ID NO: 24291 - DNA, 25 bp, Artificial Sequence
  synthetic circulating small noncoding RNA (sncRNA) 5' YRNA-derived fragment
aaacaccactgcactcggaccagcc

SEQ ID NO: 24292 - DNA, 30 bp, Artificial Sequence
  synthetic circulating small noncoding RNA (sncRNA) 5' YRNA-derived fragment
tgattgtctgaaggtagtgagttatctcaa

SEQ ID NO: 24293 - DNA, 35 bp, Artificial Sequence
  synthetic circulating small noncoding RNA (sncRNA) 5' YRNA-derived fragment
ggctggtccgatggtagtgggttatcagaacttac

SEQ ID NO: 24294 - DNA, 31 bp, Artificial Sequence
  synthetic circulating small noncoding RNA (sncRNA) 5' YRNA-derived fragment
agttctgataacccactaccatcggaccagt

SEQ ID NO: 24295 - DNA, 24 bp, Artificial Sequence
  synthetic circulating small noncoding RNA (sncRNA) 5' YRNA-derived fragment
gagtgttgtgggttattgttaagt

SEQ ID NO: 24296 - DNA, 34 bp, Artificial Sequence
  synthetic circulating small noncoding RNA (sncRNA) 5' YRNA-derived fragment
aaaccagtcaaatttagcagtggggggttgtata

SEQ ID NO: 24297 - DNA, 31 bp, Artificial Sequence
  synthetic circulating small noncoding RNA (sncRNA) 5' YRNA-derived fragment
ctggtccgatggtagtgggttatcagaactt

SEQ ID NO: 24298 - DNA, 33 bp, Artificial Sequence
  synthetic circulating small noncoding RNA (sncRNA) 5' YRNA-derived fragment
aagttctgataacccactaccattggaccaggc

SEQ ID NO: 24299 - DNA, 31 bp, Artificial Sequence
  synthetic circulating small noncoding RNA (sncRNA) 5' YRNA-derived fragment
tgattgtctgaaggtagtgagttatctcaat

SEQ ID NO: 24300 - DNA, 34 bp, Artificial Sequence
  synthetic circulating small noncoding RNA (sncRNA) 5' YRNA-derived fragment
taagttctgataacccactaccatccgacaagcc

SEQ ID NO: 24301 - DNA, 30 bp, Artificial Sequence
  synthetic circulating small noncoding RNA (sncRNA) 5' YRNA-derived fragment
ggctggtctgaaggtagtgagttagctcaa

SEQ ID NO: 24302 - DNA, 28 bp, Artificial Sequence
  synthetic circulating small noncoding RNA (sncRNA) 5' YRNA-derived fragment
agttctgataacccactaccattggaca

SEQ ID NO: 24303 - DNA, 19 bp, Artificial Sequence
  synthetic circulating small noncoding RNA (sncRNA) 5' YRNA-derived fragment
acaaccgcgcttgactagc

SEQ ID NO: 24304 - DNA, 32 bp, Artificial Sequence
  synthetic circulating small noncoding RNA (sncRNA) 5' YRNA-derived fragment
agttctgataacccactaccattggaccaacc

SEQ ID NO: 24305 - DNA, 24 bp, Artificial Sequence
  synthetic circulating small noncoding RNA (sncRNA) 5' YRNA-derived fragment
tcagtcaaatttagcagtgggggg

SEQ ID NO: 24306 - DNA, 33 bp, Artificial Sequence
  synthetic circulating small noncoding RNA (sncRNA) 5' YRNA-derived fragment
aagttctgataacccactaccattggaccagcc

SEQ ID NO: 24307 - DNA, 28 bp, Artificial Sequence
  synthetic circulating small noncoding RNA (sncRNA) 5' YRNA-derived fragment
atttctgataacccactaccatcggacc

SEQ ID NO: 24308 - DNA, 29 bp, Artificial Sequence
  synthetic circulating small noncoding RNA (sncRNA) 5' YRNA-derived fragment
tctgataacccactaccatcggaccagtc

SEQ ID NO: 24309 - DNA, 19 bp, Artificial Sequence
  synthetic circulating small noncoding RNA (sncRNA) 5' YRNA-derived fragment
acaataacccacaacactc

SEQ ID NO: 24310 - DNA, 37 bp, Artificial Sequence
  synthetic circulating small noncoding RNA (sncRNA) 5' YRNA-derived fragment
ggctggtccgatggtagtgggttatcagaacttacta

SEQ ID NO: 24311 - DNA, 35 bp, Artificial Sequence
  synthetic circulating small noncoding RNA (sncRNA) 5' YRNA-derived fragment
tacaaccccccactgctaaatttgactggcttttt

SEQ ID NO: 24312 - DNA, 24 bp, Artificial Sequence
  synthetic circulating small noncoding RNA (sncRNA) 5' YRNA-derived fragment
taactcactaccttcggaccagcc

SEQ ID NO: 24313 - DNA, 21 bp, Artificial Sequence
  synthetic circulating small noncoding RNA (sncRNA) 5' YRNA-derived fragment
agccagtcaaatttagcagtg

SEQ ID NO: 24314 - DNA, 28 bp, Artificial Sequence
  synthetic circulating small noncoding RNA (sncRNA) 5' YRNA-derived fragment
ctcccactgcttcacttgactagccttt

SEQ ID NO: 24315 - DNA, 24 bp, Artificial Sequence
  synthetic circulating small noncoding RNA (sncRNA) 5' YRNA-derived fragment
agttggtccgagtgttgtgggtta

SEQ ID NO: 24316 - DNA, 30 bp, Artificial Sequence
  synthetic circulating small noncoding RNA (sncRNA) 5' YRNA-derived fragment
ttctgataacccactaccatcggaccagtc

SEQ ID NO: 24317 - DNA, 36 bp, Artificial Sequence
  synthetic circulating small noncoding RNA (sncRNA) 5' YRNA-derived fragment
aatcaattgagataactcactaccttcggaccagcc

SEQ ID NO: 24318 - DNA, 39 bp, Artificial Sequence
  synthetic circulating small noncoding RNA (sncRNA) 5' YRNA-derived fragment
ggctggtccgatggtagtgatttatcagaacttattaac

SEQ ID NO: 24319 - DNA, 26 bp, Artificial Sequence
  synthetic circulating small noncoding RNA (sncRNA) 5' YRNA-derived fragment
aagccagtcaaatttagcagtgaggg

SEQ ID NO: 24320 - DNA, 25 bp, Artificial Sequence
  synthetic circulating small noncoding RNA (sncRNA) 5' YRNA-derived fragment
gataacccactaccatcggaccagc

SEQ ID NO: 24321 - DNA, 31 bp, Artificial Sequence
  synthetic circulating small noncoding RNA (sncRNA) 5' YRNA-derived fragment
gctggtcagatggtagtgggttatcagaact

SEQ ID NO: 24322 - DNA, 26 bp, Artificial Sequence
  synthetic circulating small noncoding RNA (sncRNA) 5' YRNA-derived fragment
agttctgataacccactaccatcgaa

SEQ ID NO: 24323 - DNA, 31 bp, Artificial Sequence
  synthetic circulating small noncoding RNA (sncRNA) 5' YRNA-derived fragment
atttctgataacccactaccatcggaccagc

SEQ ID NO: 24324 - DNA, 22 bp, Artificial Sequence
  synthetic circulating small noncoding RNA (sncRNA) 5' YRNA-derived fragment
accgcgcttgactagcttgctg

SEQ ID NO: 24325 - DNA, 24 bp, Artificial Sequence
  synthetic circulating small noncoding RNA (sncRNA) 5' YRNA-derived fragment
ccactgctaaatttgactggcttt

SEQ ID NO: 24326 - DNA, 31 bp, Artificial Sequence
  synthetic circulating small noncoding RNA (sncRNA) 5' YRNA-derived fragment
gttctgataacccactaccatcagaccagct

SEQ ID NO: 24327 - DNA, 23 bp, Artificial Sequence
  synthetic circulating small noncoding RNA (sncRNA) 5' YRNA-derived fragment
tcccactgcttcacttgactagc

SEQ ID NO: 24328 - DNA, 25 bp, Artificial Sequence
  synthetic circulating small noncoding RNA (sncRNA) 5' YRNA-derived fragment
cccactgcttcacttgactagcctt

SEQ ID NO: 24329 - DNA, 32 bp, Artificial Sequence
  synthetic circulating small noncoding RNA (sncRNA) 5' YRNA-derived fragment
aggctagtcaagtgaagcagtgggagtggaga

SEQ ID NO: 24330 - DNA, 42 bp, Artificial Sequence
  synthetic circulating small noncoding RNA (sncRNA) 5' YRNA-derived fragment
taaagttggtatacaaccccccactgctaaatttgactggct

SEQ ID NO: 24331 - DNA, 27 bp, Artificial Sequence
  synthetic circulating small noncoding RNA (sncRNA) 5' YRNA-derived fragment
accccccactgctaaatttgactggct

SEQ ID NO: 24332 - DNA, 27 bp, Artificial Sequence
  synthetic circulating small noncoding RNA (sncRNA) 5' YRNA-derived fragment
ctccccactgctaaatttgactaactt

SEQ ID NO: 24333 - DNA, 31 bp, Artificial Sequence
  synthetic circulating small noncoding RNA (sncRNA) 5' YRNA-derived fragment
agttctgataacccactaccattggaccacc

SEQ ID NO: 24334 - DNA, 22 bp, Artificial Sequence
  synthetic circulating small noncoding RNA (sncRNA) 5' YRNA-derived fragment
ccccccactgctaaatttgact

SEQ ID NO: 24335 - DNA, 31 bp, Artificial Sequence
  synthetic circulating small noncoding RNA (sncRNA) 5' YRNA-derived fragment
tggtccgatggtagtgggttatcagaactta

SEQ ID NO: 24336 - DNA, 36 bp, Artificial Sequence
  synthetic circulating small noncoding RNA (sncRNA) 5' YRNA-derived fragment
ccttctccactcccactgcttcacttgactagcctt

SEQ ID NO: 24337 - DNA, 36 bp, Artificial Sequence
  synthetic circulating small noncoding RNA (sncRNA) 5' YRNA-derived fragment
ggctggtccgatggtagtgggttaccagaacttaat

SEQ ID NO: 24338 - DNA, 26 bp, Artificial Sequence
  synthetic circulating small noncoding RNA (sncRNA) 5' YRNA-derived fragment
aagccagtcaaatttagcagttgggg

SEQ ID NO: 24339 - DNA, 33 bp, Artificial Sequence
  synthetic circulating small noncoding RNA (sncRNA) 5' YRNA-derived fragment
cggctggtccgatggtagtgggttatcagaact

SEQ ID NO: 24340 - DNA, 27 bp, Artificial Sequence
  synthetic circulating small noncoding RNA (sncRNA) 5' YRNA-derived fragment
aagctagtcaaatttagcagtggggac

SEQ ID NO: 24341 - DNA, 35 bp, Artificial Sequence
  synthetic circulating small noncoding RNA (sncRNA) 5' YRNA-derived fragment
ccttctccactcccactgcttcacttgactagcct

SEQ ID NO: 24342 - DNA, 41 bp, Artificial Sequence
  synthetic circulating small noncoding RNA (sncRNA) 5' YRNA-derived fragment
ttgttccttctccactcccactgcttcacttgactagcctt

SEQ ID NO: 24343 - DNA, 41 bp, Artificial Sequence
  synthetic circulating small noncoding RNA (sncRNA) 5' YRNA-derived fragment
ttgttccttctccactcccactgcttcacttgactagccta

SEQ ID NO: 24344 - DNA, 23 bp, Artificial Sequence
  synthetic circulating small noncoding RNA (sncRNA) 5' YRNA-derived fragment
cccactgctaaatttgactggct

SEQ ID NO: 24345 - DNA, 27 bp, Artificial Sequence
  synthetic circulating small noncoding RNA (sncRNA) 5' YRNA-derived fragment
ctgataacccactaccatcggaccagc

SEQ ID NO: 24346 - DNA, 31 bp, Artificial Sequence
  synthetic circulating small noncoding RNA (sncRNA) 5' YRNA-derived fragment
ggctggtcagaaggtagtgagttatctcaat

SEQ ID NO: 24347 - DNA, 40 bp, Artificial Sequence
  synthetic circulating small noncoding RNA (sncRNA) 5' YRNA-derived fragment
ttgttccttctccactcccactgcttcacttgactagcct

SEQ ID NO: 24348 - DNA, 36 bp, Artificial Sequence
  synthetic circulating small noncoding RNA (sncRNA) 5' YRNA-derived fragment
ggctggtccgagtgcagtggtgtttacaactaattg

SEQ ID NO: 24349 - DNA, 32 bp, Artificial Sequence
  synthetic circulating small noncoding RNA (sncRNA) 5' YRNA-derived fragment
atacaaccccccactgctaaatttgactggct

SEQ ID NO: 24350 - DNA, 28 bp, Artificial Sequence
  synthetic circulating small noncoding RNA (sncRNA) 5' YRNA-derived fragment
ggcttgtctgatggtagtgggttatcag

SEQ ID NO: 24351 - DNA, 39 bp, Artificial Sequence
  synthetic circulating small noncoding RNA (sncRNA) 5' YRNA-derived fragment
gttaatgagttctgataacccactaccatcggaccagcc

SEQ ID NO: 24352 - DNA, 26 bp, Artificial Sequence
  synthetic circulating small noncoding RNA (sncRNA) 5' YRNA-derived fragment
aagccagtaaaatttagcagtgggga

SEQ ID NO: 24353 - DNA, 31 bp, Artificial Sequence
  synthetic circulating small noncoding RNA (sncRNA) 5' YRNA-derived fragment
gactggtccgaaggtagtgagttatgtcaat

SEQ ID NO: 24354 - DNA, 27 bp, Artificial Sequence
  synthetic circulating small noncoding RNA (sncRNA) 5' YRNA-derived fragment
atcccccctgctaaatttgactggcta

SEQ ID NO: 24355 - DNA, 22 bp, Artificial Sequence
  synthetic circulating small noncoding RNA (sncRNA) 5' YRNA-derived fragment
cccactgctaaatttgactggc

SEQ ID NO: 24356 - DNA, 24 bp, Artificial Sequence
  synthetic circulating small noncoding RNA (sncRNA) 5' YRNA-derived fragment
aacaccactgcactcggaccagcc

SEQ ID NO: 24357 - DNA, 22 bp, Artificial Sequence
  synthetic circulating small noncoding RNA (sncRNA) 5' YRNA-derived fragment
ggctggtccgagtgcagtggtg

SEQ ID NO: 24358 - DNA, 25 bp, Artificial Sequence
  synthetic circulating small noncoding RNA (sncRNA) 5' YRNA-derived fragment
ttcagtcaaatttagcagtgggggg

SEQ ID NO: 24359 - DNA, 30 bp, Artificial Sequence
  synthetic circulating small noncoding RNA (sncRNA) 5' YRNA-derived fragment
ccccccactgctaaatttgactggctttaa

SEQ ID NO: 24360 - DNA, 26 bp, Artificial Sequence
  synthetic circulating small noncoding RNA (sncRNA) 5' YRNA-derived fragment
gctggtccgatggtagtgggttatca

SEQ ID NO: 24361 - DNA, 18 bp, Artificial Sequence
  synthetic circulating small noncoding RNA (sncRNA) 5' YRNA-derived fragment
gttgtgggttattgttaa

SEQ ID NO: 24362 - DNA, 31 bp, Artificial Sequence
  synthetic circulating small noncoding RNA (sncRNA) 5' YRNA-derived fragment
aattgagataactcactaccttcggaccagc

SEQ ID NO: 24363 - DNA, 31 bp, Artificial Sequence
  synthetic circulating small noncoding RNA (sncRNA) 5' YRNA-derived fragment
gctggtccgatggtagtgggttaccagaact

SEQ ID NO: 24364 - DNA, 26 bp, Artificial Sequence
  synthetic circulating small noncoding RNA (sncRNA) 5' YRNA-derived fragment
tagccagtcaaatttagcagttgggg

SEQ ID NO: 24365 - DNA, 33 bp, Artificial Sequence
  synthetic circulating small noncoding RNA (sncRNA) 5' YRNA-derived fragment
ggctggtacaatggtagtgggttatcagaactt

SEQ ID NO: 24366 - DNA, 21 bp, Artificial Sequence
  synthetic circulating small noncoding RNA (sncRNA) 5' YRNA-derived fragment
agtcaagtgaagcagtgggag

SEQ ID NO: 24367 - DNA, 32 bp, Artificial Sequence
  synthetic circulating small noncoding RNA (sncRNA) 5' YRNA-derived fragment
ggctggtccgaatgtagtgagttatctcaatt

SEQ ID NO: 24368 - DNA, 37 bp, Artificial Sequence
  synthetic circulating small noncoding RNA (sncRNA) 5' YRNA-derived fragment
ggctggtccgatggtagcgggttatcagaacctatta

SEQ ID NO: 24369 - DNA, 21 bp, Artificial Sequence
  synthetic circulating small noncoding RNA (sncRNA) 5' YRNA-derived fragment
ccccactgctaaatttgactg

SEQ ID NO: 24370 - DNA, 30 bp, Artificial Sequence
  synthetic circulating small noncoding RNA (sncRNA) 5' YRNA-derived fragment
aaccccccactgctaaatttgactggcttt

SEQ ID NO: 24371 - DNA, 24 bp, Artificial Sequence
  synthetic circulating small noncoding RNA (sncRNA) 5' YRNA-derived fragment
aagccagtcaaatttagcagtggg

SEQ ID NO: 24372 - DNA, 26 bp, Artificial Sequence
  synthetic circulating small noncoding RNA (sncRNA) 5' YRNA-derived fragment
ggcttttccgatggtagtgggttatc

SEQ ID NO: 24373 - DNA, 20 bp, Artificial Sequence
  synthetic circulating small noncoding RNA (sncRNA) 5' YRNA-derived fragment
agccagtcaaatttagcagt

SEQ ID NO: 24374 - DNA, 30 bp, Artificial Sequence
  synthetic circulating small noncoding RNA (sncRNA) 5' YRNA-derived fragment
gactggtccgaaggtagtgagttatgtcaa

SEQ ID NO: 24375 - DNA, 29 bp, Artificial Sequence
  synthetic circulating small noncoding RNA (sncRNA) 5' YRNA-derived fragment
tctgacaacccactaccatcggaccagcc

SEQ ID NO: 24376 - DNA, 34 bp, Artificial Sequence
  synthetic circulating small noncoding RNA (sncRNA) 5' YRNA-derived fragment
ttctccactcccactgcttcacttgactagccta

SEQ ID NO: 24377 - DNA, 34 bp, Artificial Sequence
  synthetic circulating small noncoding RNA (sncRNA) 5' YRNA-derived fragment
tggctggtccgatggtagtgggttatcagaactt

SEQ ID NO: 24378 - DNA, 31 bp, Artificial Sequence
  synthetic circulating small noncoding RNA (sncRNA) 5' YRNA-derived fragment
gactggtccgaaggtagtgagttatctcagt

SEQ ID NO: 24379 - DNA, 30 bp, Artificial Sequence
  synthetic circulating small noncoding RNA (sncRNA) 5' YRNA-derived fragment
tttctgataacccactaccatcggaccagc

SEQ ID NO: 24380 - DNA, 30 bp, Artificial Sequence
  synthetic circulating small noncoding RNA (sncRNA) 5' YRNA-derived fragment
ggcttgtctgatggtagtgggttatcagaa

SEQ ID NO: 24381 - DNA, 30 bp, Artificial Sequence
  synthetic circulating small noncoding RNA (sncRNA) 5' YRNA-derived fragment
tccactcccactgcttcacttgactagcct

SEQ ID NO: 24382 - DNA, 22 bp, Artificial Sequence
  synthetic circulating small noncoding RNA (sncRNA) 5' YRNA-derived fragment
caccactgcactcggaccagcc

SEQ ID NO: 24383 - DNA, 24 bp, Artificial Sequence
  synthetic circulating small noncoding RNA (sncRNA) 5' YRNA-derived fragment
actagtcaagtgtagtagtgagaa

SEQ ID NO: 24384 - DNA, 37 bp, Artificial Sequence
  synthetic circulating small noncoding RNA (sncRNA) 5' YRNA-derived fragment
tattaagttctgataacccactaccattggaccagcc

SEQ ID NO: 24385 - DNA, 26 bp, Artificial Sequence
  synthetic circulating small noncoding RNA (sncRNA) 5' YRNA-derived fragment
gactagtcaagtgcagtagtgagaag

SEQ ID NO: 24386 - DNA, 39 bp, Artificial Sequence
  synthetic circulating small noncoding RNA (sncRNA) 5' YRNA-derived fragment
gttaataagttctgataacccactaccattggacaagcc

SEQ ID NO: 24387 - DNA, 30 bp, Artificial Sequence
  synthetic circulating small noncoding RNA (sncRNA) 5' YRNA-derived fragment
acaaccccccactgctaaatttgactggct

SEQ ID NO: 24388 - DNA, 34 bp, Artificial Sequence
  synthetic circulating small noncoding RNA (sncRNA) 5' YRNA-derived fragment
ggctggtcagatggtagtgggttatcagaactta

SEQ ID NO: 24389 - DNA, 30 bp, Artificial Sequence
  synthetic circulating small noncoding RNA (sncRNA) 5' YRNA-derived fragment
gctggtccgatggtagcgggttatcagaac

SEQ ID NO: 24390 - DNA, 31 bp, Artificial Sequence
  synthetic circulating small noncoding RNA (sncRNA) 5' YRNA-derived fragment
ggctggtctgaaggtagtgagttagctcaat

SEQ ID NO: 24391 - DNA, 23 bp, Artificial Sequence
  synthetic circulating small noncoding RNA (sncRNA) 5' YRNA-derived fragment
tgtggtagtgggttatcagaact

SEQ ID NO: 24392 - DNA, 27 bp, Artificial Sequence
  synthetic circulating small noncoding RNA (sncRNA) 5' YRNA-derived fragment
agactagtcaagtgtagtagtgagaag

SEQ ID NO: 24393 - DNA, 31 bp, Artificial Sequence
  synthetic circulating small noncoding RNA (sncRNA) 5' YRNA-derived fragment
ggtccgatggtagtgggttatcagaacttat

SEQ ID NO: 24394 - DNA, 27 bp, Artificial Sequence
  synthetic circulating small noncoding RNA (sncRNA) 5' YRNA-derived fragment
aagctagtcaaatttagcagtgggggg

SEQ ID NO: 24395 - DNA, 32 bp, Artificial Sequence
  synthetic circulating small noncoding RNA (sncRNA) 5' YRNA-derived fragment
ggctggtccgagtgcagtggtgtttacaacta

SEQ ID NO: 24396 - DNA, 26 bp, Artificial Sequence
  synthetic circulating small noncoding RNA (sncRNA) 5' YRNA-derived fragment
tcccactgcttcacttgactagccta

SEQ ID NO: 24397 - DNA, 28 bp, Artificial Sequence
  synthetic circulating small noncoding RNA (sncRNA) 5' YRNA-derived fragment
aaagctagtcaagcgtggttgtgggggg

SEQ ID NO: 24398 - DNA, 27 bp, Artificial Sequence
  synthetic circulating small noncoding RNA (sncRNA) 5' YRNA-derived fragment
ccccccattgctaaatctgactggctt

SEQ ID NO: 24399 - DNA, 29 bp, Artificial Sequence
  synthetic circulating small noncoding RNA (sncRNA) 5' YRNA-derived fragment
ttgtctgatggtagtgggttatcagaact

SEQ ID NO: 24400 - DNA, 28 bp, Artificial Sequence
  synthetic circulating small noncoding RNA (sncRNA) 5' YRNA-derived fragment
actcccactgcttcacttgactagccta

SEQ ID NO: 24401 - DNA, 37 bp, Artificial Sequence
  synthetic circulating small noncoding RNA (sncRNA) 5' YRNA-derived fragment
ggctggtccgagtgcagtggtgtttacaactaattga

SEQ ID NO: 24402 - DNA, 18 bp, Artificial Sequence
  synthetic circulating small noncoding RNA (sncRNA) 5' YRNA-derived fragment
ctgctaaatttgactggc

SEQ ID NO: 24403 - DNA, 30 bp, Artificial Sequence
  synthetic circulating small noncoding RNA (sncRNA) 5' YRNA-derived fragment
ccccccacaaccgcgcttgactagcttgct

SEQ ID NO: 24404 - DNA, 28 bp, Artificial Sequence
  synthetic circulating small noncoding RNA (sncRNA) 5' YRNA-derived fragment
gactggtccgaaggtagtgagttatctc

SEQ ID NO: 24405 - DNA, 28 bp, Artificial Sequence
  synthetic circulating small noncoding RNA (sncRNA) 5' YRNA-derived fragment
aggctagtcaagtgaagcagtgggagtg

SEQ ID NO: 24406 - DNA, 37 bp, Artificial Sequence
  synthetic circulating small noncoding RNA (sncRNA) 5' YRNA-derived fragment
ggctggtcagatggtagtgggttatcagaacttatta

SEQ ID NO: 24407 - DNA, 19 bp, Artificial Sequence
  synthetic circulating small noncoding RNA (sncRNA) 5' YRNA-derived fragment
ctgctaaatttgactggct

SEQ ID NO: 24408 - DNA, 36 bp, Artificial Sequence
  synthetic circulating small noncoding RNA (sncRNA) 5' YRNA-derived fragment
aataagttctgatgacccactaccatcggaccagcc

SEQ ID NO: 24409 - DNA, 39 bp, Artificial Sequence
  synthetic circulating small noncoding RNA (sncRNA) 5' YRNA-derived fragment
ttggtatacaaccccccactgctaaatttgactggcttt

SEQ ID NO: 24410 - DNA, 33 bp, Artificial Sequence
  synthetic circulating small noncoding RNA (sncRNA) 5' YRNA-derived fragment
ggctggtctgatggtagtgggttatcagaactt

SEQ ID NO: 24411 - DNA, 25 bp, Artificial Sequence
  synthetic circulating small noncoding RNA (sncRNA) 5' YRNA-derived fragment
ataactcactaccttcggaccagcc

SEQ ID NO: 24412 - DNA, 22 bp, Artificial Sequence
  synthetic circulating small noncoding RNA (sncRNA) 5' YRNA-derived fragment
ttaacattagtgtcactaaagt

SEQ ID NO: 24413 - DNA, 37 bp, Artificial Sequence
  synthetic circulating small noncoding RNA (sncRNA) 5' YRNA-derived fragment
caatcaattgagataactcactaccttcggaccagcc

SEQ ID NO: 24414 - DNA, 23 bp, Artificial Sequence
  synthetic circulating small noncoding RNA (sncRNA) 5' YRNA-derived fragment
ggctggtccgagtgcagtggtgt

SEQ ID NO: 24415 - DNA, 31 bp, Artificial Sequence
  synthetic circulating small noncoding RNA (sncRNA) 5' YRNA-derived fragment
gtttggtccaatggtagtgggttatcagaac

SEQ ID NO: 24416 - DNA, 32 bp, Artificial Sequence
  synthetic circulating small noncoding RNA (sncRNA) 5' YRNA-derived fragment
agttctgataacccactaccattggaccaccc

SEQ ID NO: 24417 - DNA, 36 bp, Artificial Sequence
  synthetic circulating small noncoding RNA (sncRNA) 5' YRNA-derived fragment
aataagttctgataacccactaccatcgaaccagcc

SEQ ID NO: 24418 - DNA, 34 bp, Artificial Sequence
  synthetic circulating small noncoding RNA (sncRNA) 5' YRNA-derived fragment
ggctggtccgatggtagtgatttatcagaactta

SEQ ID NO: 24419 - DNA, 38 bp, Artificial Sequence
  synthetic circulating small noncoding RNA (sncRNA) 5' YRNA-derived fragment
ggctggtccgagtgcagtggtgtttacaactaattgat

SEQ ID NO: 24420 - DNA, 23 bp, Artificial Sequence
  synthetic circulating small noncoding RNA (sncRNA) 5' YRNA-derived fragment
actagtcaagtgaagcagtggga

SEQ ID NO: 24421 - DNA, 23 bp, Artificial Sequence
  synthetic circulating small noncoding RNA (sncRNA) 5' YRNA-derived fragment
aataagttctgataacccactac

SEQ ID NO: 24422 - DNA, 29 bp, Artificial Sequence
  synthetic circulating small noncoding RNA (sncRNA) 5' YRNA-derived fragment
ggcttgtctgatggtagtgggttatcaga

SEQ ID NO: 24423 - DNA, 25 bp, Artificial Sequence
  synthetic circulating small noncoding RNA (sncRNA) 5' YRNA-derived fragment
actagtcaagtgtagtagtgagaag

SEQ ID NO: 24424 - DNA, 20 bp, Artificial Sequence
  synthetic circulating small noncoding RNA (sncRNA) 5' YRNA-derived fragment
aacaataacccacaacactc

SEQ ID NO: 24425 - DNA, 26 bp, Artificial Sequence
  synthetic circulating small noncoding RNA (sncRNA) 5' YRNA-derived fragment
ccctcgctgctaaatttgactggctt

SEQ ID NO: 24426 - DNA, 28 bp, Artificial Sequence
  synthetic circulating small noncoding RNA (sncRNA) 5' YRNA-derived fragment
ttctgataacccactaccatcggaccag

SEQ ID NO: 24427 - DNA, 45 bp, Artificial Sequence
  synthetic circulating small noncoding RNA (sncRNA) 5' YRNA-derived fragment
agttggtccgagtgttgtgggttattgttaagttgatttaacatt

SEQ ID NO: 24428 - DNA, 25 bp, Artificial Sequence
  synthetic circulating small noncoding RNA (sncRNA) 5' YRNA-derived fragment
ggctagtcaagtgaagcagtgggag

SEQ ID NO: 24429 - DNA, 26 bp, Artificial Sequence
  synthetic circulating small noncoding RNA (sncRNA) 5' YRNA-derived fragment
ggcttgtctgatggtagtgggttatc

SEQ ID NO: 24430 - DNA, 28 bp, Artificial Sequence
  synthetic circulating small noncoding RNA (sncRNA) 5' YRNA-derived fragment
ccccccattgctaaatttgactggcttt

SEQ ID NO: 24431 - DNA, 22 bp, Artificial Sequence
  synthetic circulating small noncoding RNA (sncRNA) 5' YRNA-derived fragment
cgctgctaaatttgactggctt

SEQ ID NO: 24432 - DNA, 39 bp, Artificial Sequence
  synthetic circulating small noncoding RNA (sncRNA) 5' YRNA-derived fragment
agttggtatacaaccccccactgctaaatttgactggct

SEQ ID NO: 24433 - DNA, 37 bp, Artificial Sequence
  synthetic circulating small noncoding RNA (sncRNA) 5' YRNA-derived fragment
taataagttctgataacctactaccatcggaccagcc

SEQ ID NO: 24434 - DNA, 21 bp, Artificial Sequence
  synthetic circulating small noncoding RNA (sncRNA) 5' YRNA-derived fragment
ccacaaccgcgcttgactagc

SEQ ID NO: 24435 - DNA, 25 bp, Artificial Sequence
  synthetic circulating small noncoding RNA (sncRNA) 5' YRNA-derived fragment
tcgatggcagtgggttatcagaact

SEQ ID NO: 24436 - DNA, 21 bp, Artificial Sequence
  synthetic circulating small noncoding RNA (sncRNA) 5' YRNA-derived fragment
agtcaagtgcagtagtgagaa

SEQ ID NO: 24437 - DNA, 22 bp, Artificial Sequence
  synthetic circulating small noncoding RNA (sncRNA) 5' YRNA-derived fragment
tccgagtgttgtgggttattgt

SEQ ID NO: 24438 - DNA, 21 bp, Artificial Sequence
  synthetic circulating small noncoding RNA (sncRNA) 5' YRNA-derived fragment
cagtcaaatttagcagtgggg

SEQ ID NO: 24439 - DNA, 28 bp, Artificial Sequence
  synthetic circulating small noncoding RNA (sncRNA) 5' YRNA-derived fragment
aagttctgataacccactaccatcggac

SEQ ID NO: 24440 - DNA, 33 bp, Artificial Sequence
  synthetic circulating small noncoding RNA (sncRNA) 5' YRNA-derived fragment
ggctggtctgatggtagtgggttatcagagctt

SEQ ID NO: 24441 - DNA, 19 bp, Artificial Sequence
  synthetic circulating small noncoding RNA (sncRNA) 5' YRNA-derived fragment
gaagtgggttatcagaact

SEQ ID NO: 24442 - DNA, 25 bp, Artificial Sequence
  synthetic circulating small noncoding RNA (sncRNA) 5' YRNA-derived fragment
cttctcactactacacttgactagt

SEQ ID NO: 24443 - DNA, 35 bp, Artificial Sequence
  synthetic circulating small noncoding RNA (sncRNA) 5' YRNA-derived fragment
ataagttctgataacccactaccatcggaccagtc

SEQ ID NO: 24444 - DNA, 20 bp, Artificial Sequence
  synthetic circulating small noncoding RNA (sncRNA) 5' YRNA-derived fragment
acaaccgcgcttgactagct

SEQ ID NO: 24445 - DNA, 33 bp, Artificial Sequence
  synthetic circulating small noncoding RNA (sncRNA) 5' YRNA-derived fragment
aggctagtcaagtgaagcagtgggagtggagaa

SEQ ID NO: 24446 - DNA, 28 bp, Artificial Sequence
  synthetic circulating small noncoding RNA (sncRNA) 5' YRNA-derived fragment
tcagccagtcaaatttagcagtgggggg

SEQ ID NO: 24447 - DNA, 30 bp, Artificial Sequence
  synthetic circulating small noncoding RNA (sncRNA) 5' YRNA-derived fragment
gttctgataacccactaccatcggaccagt

SEQ ID NO: 24448 - DNA, 37 bp, Artificial Sequence
  synthetic circulating small noncoding RNA (sncRNA) 5' YRNA-derived fragment
ggctggtcctatggtagtgggttatcagaacttatta

SEQ ID NO: 24449 - DNA, 28 bp, Artificial Sequence
  synthetic circulating small noncoding RNA (sncRNA) 5' YRNA-derived fragment
aaccccccactgctaaatttgactggct

SEQ ID NO: 24450 - DNA, 20 bp, Artificial Sequence
  synthetic circulating small noncoding RNA (sncRNA) 5' YRNA-derived fragment
cgcgcttgactagcttgctg

SEQ ID NO: 24451 - DNA, 20 bp, Artificial Sequence
  synthetic circulating small noncoding RNA (sncRNA) 5' YRNA-derived fragment
ttaacaataacccacaacac

SEQ ID NO: 24452 - DNA, 28 bp, Artificial Sequence
  synthetic circulating small noncoding RNA (sncRNA) 5' YRNA-derived fragment
taagccattcaaatttagcagtgggggg

SEQ ID NO: 24453 - DNA, 24 bp, Artificial Sequence
  synthetic circulating small noncoding RNA (sncRNA) 5' YRNA-derived fragment
ccccacaaccgcgcttgactagct

SEQ ID NO: 24454 - DNA, 31 bp, Artificial Sequence
  synthetic circulating small noncoding RNA (sncRNA) 5' YRNA-derived fragment
ttaacaataacccacaacactcagaccaaca

SEQ ID NO: 24455 - DNA, 28 bp, Artificial Sequence
  synthetic circulating small noncoding RNA (sncRNA) 5' YRNA-derived fragment
ggctggtccgagtgcagtggtgtttaca

SEQ ID NO: 24456 - DNA, 21 bp, Artificial Sequence
  synthetic circulating small noncoding RNA (sncRNA) 5' YRNA-derived fragment
atggtagtgggttatcagaac

SEQ ID NO: 24457 - DNA, 19 bp, Artificial Sequence
  synthetic circulating small noncoding RNA (sncRNA) 5' YRNA-derived fragment
ggctggtccgaaggtagtg

SEQ ID NO: 24458 - DNA, 29 bp, Artificial Sequence
  synthetic circulating small noncoding RNA (sncRNA) 5' YRNA-derived fragment
aaggctagtcaagtgaagcagtgggagtg

SEQ ID NO: 24459 - DNA, 28 bp, Artificial Sequence
  synthetic circulating small noncoding RNA (sncRNA) 5' YRNA-derived fragment
cgatggtagtgggttatcagaacttatt

SEQ ID NO: 24460 - DNA, 28 bp, Artificial Sequence
  synthetic circulating small noncoding RNA (sncRNA) 5' YRNA-derived fragment
aaggctagtcaagtgaagcagtgggagt

SEQ ID NO: 24461 - DNA, 19 bp, Artificial Sequence
  synthetic circulating small noncoding RNA (sncRNA) 5' YRNA-derived fragment
aaagccagtcaaatttagc

SEQ ID NO: 24462 - DNA, 34 bp, Artificial Sequence
  synthetic circulating small noncoding RNA (sncRNA) 5' YRNA-derived fragment
ggctggtccgatggtagtgggttaccagaactta

SEQ ID NO: 24463 - DNA, 26 bp, Artificial Sequence
  synthetic circulating small noncoding RNA (sncRNA) 5' YRNA-derived fragment
cccccactgctaaattttactagctt

SEQ ID NO: 24464 - DNA, 19 bp, Artificial Sequence
  synthetic circulating small noncoding RNA (sncRNA) 5' YRNA-derived fragment
ttaacaataacccacaaca

SEQ ID NO: 24465 - DNA, 27 bp, Artificial Sequence
  synthetic circulating small noncoding RNA (sncRNA) 5' YRNA-derived fragment
cttctcactactacacttgactagtct

SEQ ID NO: 24466 - DNA, 23 bp, Artificial Sequence
  synthetic circulating small noncoding RNA (sncRNA) 5' YRNA-derived fragment
attaacattagtgtcactaaagt

SEQ ID NO: 24467 - DNA, 28 bp, Artificial Sequence
  synthetic circulating small noncoding RNA (sncRNA) 5' YRNA-derived fragment
cccccactgctaaatttgactggcttaa

SEQ ID NO: 24468 - DNA, 24 bp, Artificial Sequence
  synthetic circulating small noncoding RNA (sncRNA) 5' YRNA-derived fragment
ggctagtcaagtgaagcagtggga

SEQ ID NO: 24469 - DNA, 47 bp, Artificial Sequence
  synthetic circulating small noncoding RNA (sncRNA) 5' YRNA-derived fragment
ggctggtccgatggtagtgggttatcagaacttattaacattagtgt

SEQ ID NO: 24470 - DNA, 36 bp, Artificial Sequence
  synthetic circulating small noncoding RNA (sncRNA) 5' YRNA-derived fragment
ccttctccactcccactgcttcacttgactagccta

SEQ ID NO: 24471 - DNA, 36 bp, Artificial Sequence
  synthetic circulating small noncoding RNA (sncRNA) 5' YRNA-derived fragment
attaagttctgataacccactaccattggaccagcc

SEQ ID NO: 24472 - DNA, 41 bp, Artificial Sequence
  synthetic circulating small noncoding RNA (sncRNA) 5' YRNA-derived fragment
tgaacaatcaattgagataactcactaccttcggaccagcc

SEQ ID NO: 24473 - DNA, 40 bp, Artificial Sequence
  synthetic circulating small noncoding RNA (sncRNA) 5' YRNA-derived fragment
agttggtataccacctcccactgctaaatttgactggctt

SEQ ID NO: 24474 - DNA, 24 bp, Artificial Sequence
  synthetic circulating small noncoding RNA (sncRNA) 5' YRNA-derived fragment
ttctcactactacacttgactagt

SEQ ID NO: 24475 - DNA, 21 bp, Artificial Sequence
  synthetic circulating small noncoding RNA (sncRNA) 5' YRNA-derived fragment
cccactgcttcacttgactag

SEQ ID NO: 24476 - DNA, 29 bp, Artificial Sequence
  synthetic circulating small noncoding RNA (sncRNA) 5' YRNA-derived fragment
cctcccactgctaaatttgactggcttat

SEQ ID NO: 24477 - DNA, 46 bp, Artificial Sequence
  synthetic circulating small noncoding RNA (sncRNA) 5' YRNA-derived fragment
actaaagttggtatacaaccccccactgctaaatttgactggcttt

SEQ ID NO: 24478 - DNA, 32 bp, Artificial Sequence
  synthetic circulating small noncoding RNA (sncRNA) 5' YRNA-derived fragment
gttctgataacccactaccatcggaccagcca

SEQ ID NO: 24479 - DNA, 19 bp, Artificial Sequence
  synthetic circulating small noncoding RNA (sncRNA) 5' YRNA-derived fragment
gcagtgggttatcagaact

SEQ ID NO: 24480 - DNA, 30 bp, Artificial Sequence
  synthetic circulating small noncoding RNA (sncRNA) 5' YRNA-derived fragment
ggctggtccgatggtagcgggttatcagaa

SEQ ID NO: 24481 - DNA, 37 bp, Artificial Sequence
  synthetic circulating small noncoding RNA (sncRNA) 5' YRNA-derived fragment
taataagttctgataacccactaccattggaccaggc

SEQ ID NO: 24482 - DNA, 27 bp, Artificial Sequence
  synthetic circulating small noncoding RNA (sncRNA) 5' YRNA-derived fragment
taggctagtcaagtgaagcagtgggag

SEQ ID NO: 24483 - DNA, 20 bp, Artificial Sequence
  synthetic circulating small noncoding RNA (sncRNA) 5' YRNA-derived fragment
ccccacaaccgcgcttgact

SEQ ID NO: 24484 - DNA, 30 bp, Artificial Sequence
  synthetic circulating small noncoding RNA (sncRNA) 5' YRNA-derived fragment
ggctggtccaaaggtagtgagttatctcaa

SEQ ID NO: 24485 - DNA, 27 bp, Artificial Sequence
  synthetic circulating small noncoding RNA (sncRNA) 5' YRNA-derived fragment
tttccgatggtagtgggttatctgaac

SEQ ID NO: 24486 - DNA, 23 bp, Artificial Sequence
  synthetic circulating small noncoding RNA (sncRNA) 5' YRNA-derived fragment
acaccactgcactcggaccagcc

SEQ ID NO: 24487 - DNA, 33 bp, Artificial Sequence
  synthetic circulating small noncoding RNA (sncRNA) 5' YRNA-derived fragment
agccagtcaaatttagcagtggggggttgtata

SEQ ID NO: 24488 - DNA, 45 bp, Artificial Sequence
  synthetic circulating small noncoding RNA (sncRNA) 5' YRNA-derived fragment
tttctttgttccttctccactcccactgcttcacttgactagcct

SEQ ID NO: 24489 - DNA, 31 bp, Artificial Sequence
  synthetic circulating small noncoding RNA (sncRNA) 5' YRNA-derived fragment
ggctggtccgatggtagcaggttatcagaac

SEQ ID NO: 24490 - DNA, 19 bp, Artificial Sequence
  synthetic circulating small noncoding RNA (sncRNA) 5' YRNA-derived fragment
agtgttgtgggttattgtt

SEQ ID NO: 24491 - DNA, 37 bp, Artificial Sequence
  synthetic circulating small noncoding RNA (sncRNA) 5' YRNA-derived fragment
ggctggtccgatggtagtgggttaccagaacttaata

SEQ ID NO: 24492 - DNA, 29 bp, Artificial Sequence
  synthetic circulating small noncoding RNA (sncRNA) 5' YRNA-derived fragment
ggctggtctgatggtagtgggttatcagt

SEQ ID NO: 24493 - DNA, 21 bp, Artificial Sequence
  synthetic circulating small noncoding RNA (sncRNA) 5' YRNA-derived fragment
gtagtgggttatcagaactta

SEQ ID NO: 24494 - DNA, 42 bp, Artificial Sequence
  synthetic circulating small noncoding RNA (sncRNA) 5' YRNA-derived fragment
ctttgttccttctccactcccactgcttcacttgactagcct

SEQ ID NO: 24495 - DNA, 31 bp, Artificial Sequence
  synthetic circulating small noncoding RNA (sncRNA) 5' YRNA-derived fragment
ggctggtctgatggtagtgggttatcagtgg

SEQ ID NO: 24496 - DNA, 18 bp, Artificial Sequence
  synthetic circulating small noncoding RNA (sncRNA) 5' YRNA-derived fragment
agtgggttatcagaactt

SEQ ID NO: 24497 - DNA, 19 bp, Artificial Sequence
  synthetic circulating small noncoding RNA (sncRNA) 5' YRNA-derived fragment
caaccgcgcttgactagct

SEQ ID NO: 24498 - DNA, 25 bp, Artificial Sequence
  synthetic circulating small noncoding RNA (sncRNA) 5' YRNA-derived fragment
ggctggtccgatggtagtgggttac

SEQ ID NO: 24499 - DNA, 31 bp, Artificial Sequence
  synthetic circulating small noncoding RNA (sncRNA) 5' YRNA-derived fragment
gggtggtccaatggtagtgggttatcagaac

SEQ ID NO: 24500 - DNA, 43 bp, Artificial Sequence
  synthetic circulating small noncoding RNA (sncRNA) 5' YRNA-derived fragment
cagccagtcaaatttagcagtggggggttgtataccaacttta

SEQ ID NO: 24501 - DNA, 18 bp, Artificial Sequence
  synthetic circulating small noncoding RNA (sncRNA) 5' YRNA-derived fragment
agtgttgtgggttattgt

SEQ ID NO: 24502 - DNA, 31 bp, Artificial Sequence
  synthetic circulating small noncoding RNA (sncRNA) 5' YRNA-derived fragment
atacaaccccccactgctaaatttgactggc

SEQ ID NO: 24503 - DNA, 18 bp, Artificial Sequence
  synthetic circulating small noncoding RNA (sncRNA) 5' YRNA-derived fragment
acaaccgcgcttgactag

SEQ ID NO: 24504 - DNA, 26 bp, Artificial Sequence
  synthetic circulating small noncoding RNA (sncRNA) 5' YRNA-derived fragment
agccagtcaaatttagcagtggggtg

SEQ ID NO: 24505 - DNA, 22 bp, Artificial Sequence
  synthetic circulating small noncoding RNA (sncRNA) 5' YRNA-derived fragment
ccccccacaaccgcgcttgact

SEQ ID NO: 24506 - DNA, 26 bp, Artificial Sequence
  synthetic circulating small noncoding RNA (sncRNA) 5' YRNA-derived fragment
tcctgtggtagtgggttatcagaact

SEQ ID NO: 24507 - DNA, 20 bp, Artificial Sequence
  synthetic circulating small noncoding RNA (sncRNA) 5' YRNA-derived fragment
cagccagtcaaatttagcag

SEQ ID NO: 24508 - DNA, 27 bp, Artificial Sequence
  synthetic circulating small noncoding RNA (sncRNA) 5' YRNA-derived fragment
cccctcgctgctaaatttgactggctt

SEQ ID NO: 24509 - DNA, 34 bp, Artificial Sequence
  synthetic circulating small noncoding RNA (sncRNA) 5' YRNA-derived fragment
ggctggtccgatggtagcgggttatcagaaccta

SEQ ID NO: 24510 - DNA, 28 bp, Artificial Sequence
  synthetic circulating small noncoding RNA (sncRNA) 5' YRNA-derived fragment
tctgataacccactaccatcggaccagc

SEQ ID NO: 24511 - DNA, 40 bp, Artificial Sequence
  synthetic circulating small noncoding RNA (sncRNA) 5' YRNA-derived fragment
agttggtccgagtgttgtgggttattgttaagttgattta

SEQ ID NO: 24512 - DNA, 22 bp, Artificial Sequence
  synthetic circulating small noncoding RNA (sncRNA) 5' YRNA-derived fragment
agtcaagtgcagtagtgagaag

SEQ ID NO: 24513 - DNA, 36 bp, Artificial Sequence
  synthetic circulating small noncoding RNA (sncRNA) 5' YRNA-derived fragment
ggctggtctgatggtagtgggttatcagagcttatt

SEQ ID NO: 24514 - DNA, 31 bp, Artificial Sequence
  synthetic circulating small noncoding RNA (sncRNA) 5' YRNA-derived fragment
agttctgataacctactaccatcggaccagc

SEQ ID NO: 24515 - DNA, 25 bp, Artificial Sequence
  synthetic circulating small noncoding RNA (sncRNA) 5' YRNA-derived fragment
ccgatggtagtgggttaccagaact

SEQ ID NO: 24516 - DNA, 29 bp, Artificial Sequence
  synthetic circulating small noncoding RNA (sncRNA) 5' YRNA-derived fragment
cactcccactgcttcacttgactagccta

SEQ ID NO: 24517 - DNA, 34 bp, Artificial Sequence
  synthetic circulating small noncoding RNA (sncRNA) 5' YRNA-derived fragment
cttctccactcccactgcttcacttgactagcct

SEQ ID NO: 24518 - DNA, 40 bp, Artificial Sequence
  synthetic circulating small noncoding RNA (sncRNA) 5' YRNA-derived fragment
tgttaataagttctgataacccactaccattggacaagcc

SEQ ID NO: 24519 - DNA, 24 bp, Artificial Sequence
  synthetic circulating small noncoding RNA (sncRNA) 5' YRNA-derived fragment
actagtcaagtgcagtagtgagca

SEQ ID NO: 24520 - DNA, 25 bp, Artificial Sequence
  synthetic circulating small noncoding RNA (sncRNA) 5' YRNA-derived fragment
tccgagtgttgtgggttattgttaa

SEQ ID NO: 24521 - DNA, 31 bp, Artificial Sequence
  synthetic circulating small noncoding RNA (sncRNA) 5' YRNA-derived fragment
attgagataactcgctaccttaggaccagcc

SEQ ID NO: 24522 - DNA, 20 bp, Artificial Sequence
  synthetic circulating small noncoding RNA (sncRNA) 5' YRNA-derived fragment
gccagtcaaatttagcagtg

SEQ ID NO: 24523 - DNA, 36 bp, Artificial Sequence
  synthetic circulating small noncoding RNA (sncRNA) 5' YRNA-derived fragment
tatacaaccccccactgctaaatttgactggctttt

SEQ ID NO: 24524 - DNA, 25 bp, Artificial Sequence
  synthetic circulating small noncoding RNA (sncRNA) 5' YRNA-derived fragment
actagtcaagtgaagcagtgggagt

SEQ ID NO: 24525 - DNA, 31 bp, Artificial Sequence
  synthetic circulating small noncoding RNA (sncRNA) 5' YRNA-derived fragment
tctccactcccactgcttcacttgactagcc

SEQ ID NO: 24526 - DNA, 20 bp, Artificial Sequence
  synthetic circulating small noncoding RNA (sncRNA) 5' YRNA-derived fragment
agtgttgtgggttattgtta

SEQ ID NO: 24527 - DNA, 29 bp, Artificial Sequence
  synthetic circulating small noncoding RNA (sncRNA) 5' YRNA-derived fragment
aaccagtcaaatttagcagtggggggttg

SEQ ID NO: 24528 - DNA, 28 bp, Artificial Sequence
  synthetic circulating small noncoding RNA (sncRNA) 5' YRNA-derived fragment
ggctggtccgatggtagcgggttatcag

SEQ ID NO: 24529 - DNA, 33 bp, Artificial Sequence
  synthetic circulating small noncoding RNA (sncRNA) 5' YRNA-derived fragment
tctccactcccactgcttcacttgactagccta

SEQ ID NO: 24530 - DNA, 40 bp, Artificial Sequence
  synthetic circulating small noncoding RNA (sncRNA) 5' YRNA-derived fragment
ggctggtccgatggtagtgatttatcagaacttattaaca

SEQ ID NO: 24531 - DNA, 24 bp, Artificial Sequence
  synthetic circulating small noncoding RNA (sncRNA) 5' YRNA-derived fragment
tgtctcactactgcacttgactag

SEQ ID NO: 24532 - DNA, 25 bp, Artificial Sequence
  synthetic circulating small noncoding RNA (sncRNA) 5' YRNA-derived fragment
agttctgataacccactaccatcag

SEQ ID NO: 24533 - DNA, 33 bp, Artificial Sequence
  synthetic circulating small noncoding RNA (sncRNA) 5' YRNA-derived fragment
tgctagtctgatggtagtgggttatcagaactt

SEQ ID NO: 24534 - DNA, 22 bp, Artificial Sequence
  synthetic circulating small noncoding RNA (sncRNA) 5' YRNA-derived fragment
agtcaaatttagcagtgggggg

SEQ ID NO: 24535 - DNA, 39 bp, Artificial Sequence
  synthetic circulating small noncoding RNA (sncRNA) 5' YRNA-derived fragment
gctggtccgatggtagtgggttatcagaacttattaaca

SEQ ID NO: 24536 - DNA, 18 bp, Artificial Sequence
  synthetic circulating small noncoding RNA (sncRNA) 5' YRNA-derived fragment
ccccccactgctaaattt

SEQ ID NO: 24537 - DNA, 19 bp, Artificial Sequence
  synthetic circulating small noncoding RNA (sncRNA) 5' YRNA-derived fragment
gtgttgtgggttattgtta

SEQ ID NO: 24538 - DNA, 25 bp, Artificial Sequence
  synthetic circulating small noncoding RNA (sncRNA) 5' YRNA-derived fragment
cccactgctaaatttgactggcttt

SEQ ID NO: 24539 - DNA, 33 bp, Artificial Sequence
  synthetic circulating small noncoding RNA (sncRNA) 5' YRNA-derived fragment
aataagttctgataacccactaccatcggacca

SEQ ID NO: 24540 - DNA, 33 bp, Artificial Sequence
  synthetic circulating small noncoding RNA (sncRNA) 5' YRNA-derived fragment
aaggctagtcaagtgaagcagtgggagtggaga

SEQ ID NO: 24541 - DNA, 18 bp, Artificial Sequence
  synthetic circulating small noncoding RNA (sncRNA) 5' YRNA-derived fragment
gttggtccgagtgttgtg

SEQ ID NO: 24542 - DNA, 23 bp, Artificial Sequence
  synthetic circulating small noncoding RNA (sncRNA) 5' YRNA-derived fragment
ctatggtagtgggttatcagaac

SEQ ID NO: 24543 - DNA, 29 bp, Artificial Sequence
  synthetic circulating small noncoding RNA (sncRNA) 5' YRNA-derived fragment
cttctcactactgcacttgactagtcttt

SEQ ID NO: 24544 - DNA, 19 bp, Artificial Sequence
  synthetic circulating small noncoding RNA (sncRNA) 5' YRNA-derived fragment
gtagtgggttatcagagct

SEQ ID NO: 24545 - DNA, 32 bp, Artificial Sequence
  synthetic circulating small noncoding RNA (sncRNA) 5' YRNA-derived fragment
aagccagtaaaatttagcagtggggagttgta

SEQ ID NO: 24546 - DNA, 45 bp, Artificial Sequence
  synthetic circulating small noncoding RNA (sncRNA) 5' YRNA-derived fragment
cactaaagttggtatacaaccccccactgctaaatttgactggct

SEQ ID NO: 24547 - DNA, 30 bp, Artificial Sequence
  synthetic circulating small noncoding RNA (sncRNA) 5' YRNA-derived fragment
gctggtcagatggtagtgggttatcagaac

SEQ ID NO: 24548 - DNA, 26 bp, Artificial Sequence
  synthetic circulating small noncoding RNA (sncRNA) 5' YRNA-derived fragment
aagttctgataacccactaccatcgg

SEQ ID NO: 24549 - DNA, 34 bp, Artificial Sequence
  synthetic circulating small noncoding RNA (sncRNA) 5' YRNA-derived fragment
taagttctgataacccactaccattggaccaggc

SEQ ID NO: 24550 - DNA, 19 bp, Artificial Sequence
  synthetic circulating small noncoding RNA (sncRNA) 5' YRNA-derived fragment
agccagtcaaatttagcag

SEQ ID NO: 24551 - DNA, 42 bp, Artificial Sequence
  synthetic circulating small noncoding RNA (sncRNA) 5' YRNA-derived fragment
aagttggtatacaaccccccactgctaaatttgactggcttt

SEQ ID NO: 24552 - DNA, 22 bp, Artificial Sequence
  synthetic circulating small noncoding RNA (sncRNA) 5' YRNA-derived fragment
agtcaagtgaagcagtgggagt

SEQ ID NO: 24553 - DNA, 28 bp, Artificial Sequence
  synthetic circulating small noncoding RNA (sncRNA) 5' YRNA-derived fragment
taagccagtaaaatttagcagtggggag

SEQ ID NO: 24554 - DNA, 18 bp, Artificial Sequence
  synthetic circulating small noncoding RNA (sncRNA) 5' YRNA-derived fragment
ctaaatttgactggcttt

SEQ ID NO: 24555 - DNA, 41 bp, Artificial Sequence
  synthetic circulating small noncoding RNA (sncRNA) 5' YRNA-derived fragment
ggctggtccgatggtagtgggttatcagaacttactaatat

SEQ ID NO: 24556 - DNA, 26 bp, Artificial Sequence
  synthetic circulating small noncoding RNA (sncRNA) 5' YRNA-derived fragment
gttggtccgagtgttgtgggttattg

SEQ ID NO: 24557 - DNA, 29 bp, Artificial Sequence
  synthetic circulating small noncoding RNA (sncRNA) 5' YRNA-derived fragment
aggctagtcaagtgaagcagtgggagtgg

SEQ ID NO: 24558 - DNA, 34 bp, Artificial Sequence
  synthetic circulating small noncoding RNA (sncRNA) 5' YRNA-derived fragment
ggctggtcctatggtagtgggttatcagaactta

SEQ ID NO: 24559 - DNA, 34 bp, Artificial Sequence
  synthetic circulating small noncoding RNA (sncRNA) 5' YRNA-derived fragment
taagttctgataacctactaccatcggaccagcc

SEQ ID NO: 24560 - DNA, 36 bp, Artificial Sequence
  synthetic circulating small noncoding RNA (sncRNA) 5' YRNA-derived fragment
gttaatttctgataacccactaccatcggaccagcc

SEQ ID NO: 24561 - DNA, 27 bp, Artificial Sequence
  synthetic circulating small noncoding RNA (sncRNA) 5' YRNA-derived fragment
aataagttctgataacccactaccatc

SEQ ID NO: 24562 - DNA, 23 bp, Artificial Sequence
  synthetic circulating small noncoding RNA (sncRNA) 5' YRNA-derived fragment
cccccactgctaaatttgactgg

SEQ ID NO: 24563 - DNA, 30 bp, Artificial Sequence
  synthetic circulating small noncoding RNA (sncRNA) 5' YRNA-derived fragment
ttgagataactcgctaccttaggaccagcc

SEQ ID NO: 24564 - DNA, 30 bp, Artificial Sequence
  synthetic circulating small noncoding RNA (sncRNA) 5' YRNA-derived fragment
gctggtccgatggtagtgggttaccagaac

SEQ ID NO: 24565 - DNA, 21 bp, Artificial Sequence
  synthetic circulating small noncoding RNA (sncRNA) 5' YRNA-derived fragment
ccgcgcttgactagcttgctg

SEQ ID NO: 24566 - DNA, 27 bp, Artificial Sequence
  synthetic circulating small noncoding RNA (sncRNA) 5' YRNA-derived fragment
aagactagtcaagtgcagtagtgagaa

SEQ ID NO: 24567 - DNA, 31 bp, Artificial Sequence
  synthetic circulating small noncoding RNA (sncRNA) 5' YRNA-derived fragment
cagaacttattaacattagtgtcactaaagt

SEQ ID NO: 24568 - DNA, 24 bp, Artificial Sequence
  synthetic circulating small noncoding RNA (sncRNA) 5' YRNA-derived fragment
caacccactaccatcggaccagcc

SEQ ID NO: 24569 - DNA, 36 bp, Artificial Sequence
  synthetic circulating small noncoding RNA (sncRNA) 5' YRNA-derived fragment
caattagttgtaaacaccactgcactcggaccagcc

SEQ ID NO: 24570 - DNA, 28 bp, Artificial Sequence
  synthetic circulating small noncoding RNA (sncRNA) 5' YRNA-derived fragment
tgtaaacaccactgcactcggaccagcc

SEQ ID NO: 24571 - DNA, 32 bp, Artificial Sequence
  synthetic circulating small noncoding RNA (sncRNA) 5' YRNA-derived fragment
tagttgtaaacaccactgcactcggaccagcc

SEQ ID NO: 24572 - DNA, 37 bp, Artificial Sequence
  synthetic circulating small noncoding RNA (sncRNA) 5' YRNA-derived fragment
taataagttctgatgacccactaccatcggaccagcc

SEQ ID NO: 24573 - DNA, 31 bp, Artificial Sequence
  synthetic circulating small noncoding RNA (sncRNA) 5' YRNA-derived fragment
attgagataactcagtaccttcagaccagcc

SEQ ID NO: 24574 - DNA, 37 bp, Artificial Sequence
  synthetic circulating small noncoding RNA (sncRNA) 5' YRNA-derived fragment
taataagttctgataacccactaccatcgaaccagcc

SEQ ID NO: 24575 - DNA, 40 bp, Artificial Sequence
  synthetic circulating small noncoding RNA (sncRNA) 5' YRNA-derived fragment
tgttaatgagttctgataacccactaccatcggaccagcc

SEQ ID NO: 24576 - DNA, 28 bp, Artificial Sequence
  synthetic circulating small noncoding RNA (sncRNA) 5' YRNA-derived fragment
ctcccactgcttcacttgactagcctta

SEQ ID NO: 24577 - DNA, 26 bp, Artificial Sequence
  synthetic circulating small noncoding RNA (sncRNA) 5' YRNA-derived fragment
ggctggtctgaaggtagtgagttatt

SEQ ID NO: 24578 - DNA, 28 bp, Artificial Sequence
  synthetic circulating small noncoding RNA (sncRNA) 5' YRNA-derived fragment
caaccccccactgctaaatttgactggc

SEQ ID NO: 24579 - DNA, 26 bp, Artificial Sequence
  synthetic circulating small noncoding RNA (sncRNA) 5' YRNA-derived fragment
aagccagtcaaatttagcagtagggg

SEQ ID NO: 24580 - DNA, 31 bp, Artificial Sequence
  synthetic circulating small noncoding RNA (sncRNA) 5' YRNA-derived fragment
tccactcccactgcttcacttgactagcctt

SEQ ID NO: 24581 - DNA, 39 bp, Artificial Sequence
  synthetic circulating small noncoding RNA (sncRNA) 5' YRNA-derived fragment
gttggtatacaaccccccactgctaaatttgactggctt

SEQ ID NO: 24582 - DNA, 18 bp, Artificial Sequence
  synthetic circulating small noncoding RNA (sncRNA) 5' YRNA-derived fragment
acgccagtcaaatttagc

SEQ ID NO: 24583 - DNA, 25 bp, Artificial Sequence
  synthetic circulating small noncoding RNA (sncRNA) 5' YRNA-derived fragment
tccccccacaaccgcgcttgactag

SEQ ID NO: 24584 - DNA, 46 bp, Artificial Sequence
  synthetic circulating small noncoding RNA (sncRNA) 5' YRNA-derived fragment
tttctttgttccttctccactcccactgcttcacttgactagcctt

SEQ ID NO: 24585 - DNA, 18 bp, Artificial Sequence
  synthetic circulating small noncoding RNA (sncRNA) 5' YRNA-derived fragment
gttctgataaccccctac

SEQ ID NO: 24586 - DNA, 39 bp, Artificial Sequence
  synthetic circulating small noncoding RNA (sncRNA) 5' YRNA-derived fragment
ggctggtccgatggtagcgggttatcagaacctattaac

SEQ ID NO: 24587 - DNA, 22 bp, Artificial Sequence
  synthetic circulating small noncoding RNA (sncRNA) 5' YRNA-derived fragment
ccacaaccgcgcttgactagct

SEQ ID NO: 24588 - DNA, 24 bp, Artificial Sequence
  synthetic circulating small noncoding RNA (sncRNA) 5' YRNA-derived fragment
ctagtcaagtgaagcagtgggagt

SEQ ID NO: 24589 - DNA, 31 bp, Artificial Sequence
  synthetic circulating small noncoding RNA (sncRNA) 5' YRNA-derived fragment
actagtcaagtgaagcagtgggagtggagaa

SEQ ID NO: 24590 - DNA, 25 bp, Artificial Sequence
  synthetic circulating small noncoding RNA (sncRNA) 5' YRNA-derived fragment
taagttctgataacccactaccatc

SEQ ID NO: 24591 - DNA, 31 bp, Artificial Sequence
  synthetic circulating small noncoding RNA (sncRNA) 5' YRNA-derived fragment
gttctgataacccactaccattggaccaacc

SEQ ID NO: 24592 - DNA, 30 bp, Artificial Sequence
  synthetic circulating small noncoding RNA (sncRNA) 5' YRNA-derived fragment
ggctggtcccaaggtagtgacttatctcaa

SEQ ID NO: 24593 - DNA, 28 bp, Artificial Sequence
  synthetic circulating small noncoding RNA (sncRNA) 5' YRNA-derived fragment
aagactagtcaagtgcagtagtgagaag

SEQ ID NO: 24594 - DNA, 27 bp, Artificial Sequence
  synthetic circulating small noncoding RNA (sncRNA) 5' YRNA-derived fragment
tccccccacaaccgcgcttgactagct

SEQ ID NO: 24595 - DNA, 46 bp, Artificial Sequence
  synthetic circulating small noncoding RNA (sncRNA) 5' YRNA-derived fragment
ggctggtccgatggtagtgggttatcagaacttattaacattagtg

SEQ ID NO: 24596 - DNA, 19 bp, Artificial Sequence
  synthetic circulating small noncoding RNA (sncRNA) 5' YRNA-derived fragment
gccagtcaaatttagcagt

SEQ ID NO: 24597 - DNA, 26 bp, Artificial Sequence
  synthetic circulating small noncoding RNA (sncRNA) 5' YRNA-derived fragment
actcccactgcttcacttgactagcc

SEQ ID NO: 24598 - DNA, 21 bp, Artificial Sequence
  synthetic circulating small noncoding RNA (sncRNA) 5' YRNA-derived fragment
ctgctaaatttgactggcttt

SEQ ID NO: 24599 - DNA, 27 bp, Artificial Sequence
  synthetic circulating small noncoding RNA (sncRNA) 5' YRNA-derived fragment
gagataactcactaccttcggaccagc

SEQ ID NO: 24600 - DNA, 21 bp, Artificial Sequence
  synthetic circulating small noncoding RNA (sncRNA) 5' YRNA-derived fragment
cgcccactgcttcacttgact

SEQ ID NO: 24601 - DNA, 36 bp, Artificial Sequence
  synthetic circulating small noncoding RNA (sncRNA) 5' YRNA-derived fragment
aataagttctgataacccactaccattggaccaggc

SEQ ID NO: 24602 - DNA, 24 bp, Artificial Sequence
  synthetic circulating small noncoding RNA (sncRNA) 5' YRNA-derived fragment
agccagtcaaatttagcagtgggg

SEQ ID NO: 24603 - DNA, 28 bp, Artificial Sequence
  synthetic circulating small noncoding RNA (sncRNA) 5' YRNA-derived fragment
cccccacaaccgcgcttgactagcttgc

SEQ ID NO: 24604 - DNA, 28 bp, Artificial Sequence
  synthetic circulating small noncoding RNA (sncRNA) 5' YRNA-derived fragment
ttaagccagtcaaatttagcagtggggg

SEQ ID NO: 24605 - DNA, 33 bp, Artificial Sequence
  synthetic circulating small noncoding RNA (sncRNA) 5' YRNA-derived fragment
aagttctgataacccactaccattgggccagcc

SEQ ID NO: 24606 - DNA, 20 bp, Artificial Sequence
  synthetic circulating small noncoding RNA (sncRNA) 5' YRNA-derived fragment
cccactgctaaatttgactg

SEQ ID NO: 24607 - DNA, 21 bp, Artificial Sequence
  synthetic circulating small noncoding RNA (sncRNA) 5' YRNA-derived fragment
agtgggttatcagaacttatt

SEQ ID NO: 24608 - DNA, 23 bp, Artificial Sequence
  synthetic circulating small noncoding RNA (sncRNA) 5' YRNA-derived fragment
ccactgcttcacttgactagcct

SEQ ID NO: 24609 - DNA, 29 bp, Artificial Sequence
  synthetic circulating small noncoding RNA (sncRNA) 5' YRNA-derived fragment
cgatggtagtgggttatcagaacttatta

SEQ ID NO: 24610 - DNA, 32 bp, Artificial Sequence
  synthetic circulating small noncoding RNA (sncRNA) 5' YRNA-derived fragment
ttctccactcccactgcttcacttgactagcc

SEQ ID NO: 24611 - DNA, 30 bp, Artificial Sequence
  synthetic circulating small noncoding RNA (sncRNA) 5' YRNA-derived fragment
agatggtccgaaggtagtgagttatctcaa

SEQ ID NO: 24612 - DNA, 29 bp, Artificial Sequence
  synthetic circulating small noncoding RNA (sncRNA) 5' YRNA-derived fragment
agttctgataacccactaccatccgacaa

SEQ ID NO: 24613 - DNA, 26 bp, Artificial Sequence
  synthetic circulating small noncoding RNA (sncRNA) 5' YRNA-derived fragment
aagccagccaaatttcgcagtggggg

SEQ ID NO: 24614 - DNA, 32 bp, Artificial Sequence
  synthetic circulating small noncoding RNA (sncRNA) 5' YRNA-derived fragment
ggctggtctgatagtagtgggttatcagaaat

SEQ ID NO: 24615 - DNA, 23 bp, Artificial Sequence
  synthetic circulating small noncoding RNA (sncRNA) 5' YRNA-derived fragment
gagtgttgtgggttattgttaag

SEQ ID NO: 24616 - DNA, 28 bp, Artificial Sequence
  synthetic circulating small noncoding RNA (sncRNA) 5' YRNA-derived fragment
cccacaaccgcgcttgactagcttgctg

SEQ ID NO: 24617 - DNA, 24 bp, Artificial Sequence
  synthetic circulating small noncoding RNA (sncRNA) 5' YRNA-derived fragment
aagttctgataacccactaccatc

SEQ ID NO: 24618 - DNA, 26 bp, Artificial Sequence
  synthetic circulating small noncoding RNA (sncRNA) 5' YRNA-derived fragment
cccccaactgctaaatttgactggct

SEQ ID NO: 24619 - DNA, 33 bp, Artificial Sequence
  synthetic circulating small noncoding RNA (sncRNA) 5' YRNA-derived fragment
aggctggtccgatggtagtgggttatcagaact

SEQ ID NO: 24620 - DNA, 32 bp, Artificial Sequence
  synthetic circulating small noncoding RNA (sncRNA) 5' YRNA-derived fragment
aagccagccaaatttcgcagtggggggttgta

SEQ ID NO: 24621 - DNA, 32 bp, Artificial Sequence
  synthetic circulating small noncoding RNA (sncRNA) 5' YRNA-derived fragment
aaccagtcaaatttagcagtggggggttgtat

SEQ ID NO: 24622 - DNA, 21 bp, Artificial Sequence
  synthetic circulating small noncoding RNA (sncRNA) 5' YRNA-derived fragment
cccccacaaccgcgcttgact

SEQ ID NO: 24623 - DNA, 31 bp, Artificial Sequence
  synthetic circulating small noncoding RNA (sncRNA) 5' YRNA-derived fragment
ggctggtccaaaggtagtgagttatctcaat

SEQ ID NO: 24624 - DNA, 23 bp, Artificial Sequence
  synthetic circulating small noncoding RNA (sncRNA) 5' YRNA-derived fragment
gactggtccgaaggtagtgagtt

SEQ ID NO: 24625 - DNA, 30 bp, Artificial Sequence
  synthetic circulating small noncoding RNA (sncRNA) 5' YRNA-derived fragment
cccccactgctaaatttgactggcttttta

SEQ ID NO: 24626 - DNA, 24 bp, Artificial Sequence
  synthetic circulating small noncoding RNA (sncRNA) 5' YRNA-derived fragment
ccactgcttcacttgactagcctt

SEQ ID NO: 24627 - DNA, 32 bp, Artificial Sequence
  synthetic circulating small noncoding RNA (sncRNA) 5' YRNA-derived fragment
cttaacaataacccacaacactcagaccaaca

SEQ ID NO: 24628 - DNA, 21 bp, Artificial Sequence
  synthetic circulating small noncoding RNA (sncRNA) 5' YRNA-derived fragment
actttagtgacactaatgtta

SEQ ID NO: 24629 - DNA, 30 bp, Artificial Sequence
  synthetic circulating small noncoding RNA (sncRNA) 5' YRNA-derived fragment
ttctgataacccactaccatccgacaagcc

SEQ ID NO: 24630 - DNA, 28 bp, Artificial Sequence
  synthetic circulating small noncoding RNA (sncRNA) 5' YRNA-derived fragment
ccccccattgctaaatctgactggcttt

SEQ ID NO: 24631 - DNA, 27 bp, Artificial Sequence
  synthetic circulating small noncoding RNA (sncRNA) 5' YRNA-derived fragment
tgtctgatggtagtgggttatcagaac

SEQ ID NO: 24632 - DNA, 40 bp, Artificial Sequence
  synthetic circulating small noncoding RNA (sncRNA) 5' YRNA-derived fragment
tgttccttctccactcccactgcttcacttgactagcctt

SEQ ID NO: 24633 - DNA, 22 bp, Artificial Sequence
  synthetic circulating small noncoding RNA (sncRNA) 5' YRNA-derived fragment
ccactgctaaatttgactggct

SEQ ID NO: 24634 - DNA, 30 bp, Artificial Sequence
  synthetic circulating small noncoding RNA (sncRNA) 5' YRNA-derived fragment
tccgatggtagtgggttatcagaacttatt

SEQ ID NO: 24635 - DNA, 19 bp, Artificial Sequence
  synthetic circulating small noncoding RNA (sncRNA) 5' YRNA-derived fragment
aagccagtcaaatttagca

SEQ ID NO: 24636 - DNA, 32 bp, Artificial Sequence
  synthetic circulating small noncoding RNA (sncRNA) 5' YRNA-derived fragment
agttctgataaccccctaccatgggaccaacc

SEQ ID NO: 24637 - DNA, 30 bp, Artificial Sequence
  synthetic circulating small noncoding RNA (sncRNA) 5' YRNA-derived fragment
ttcagataactcactaccttcagaccagtc

SEQ ID NO: 24638 - DNA, 21 bp, Artificial Sequence
  synthetic circulating small noncoding RNA (sncRNA) 5' YRNA-derived fragment
cttctcactactgcacttgac

SEQ ID NO: 24639 - DNA, 28 bp, Artificial Sequence
  synthetic circulating small noncoding RNA (sncRNA) 5' YRNA-derived fragment
ctgataacccactaccattggacaagcc

SEQ ID NO: 24640 - DNA, 34 bp, Artificial Sequence
  synthetic circulating small noncoding RNA (sncRNA) 5' YRNA-derived fragment
taagttctgataacccactactatcggaccagcc

SEQ ID NO: 24641 - DNA, 29 bp, Artificial Sequence
  synthetic circulating small noncoding RNA (sncRNA) 5' YRNA-derived fragment
ctcccactgctaaatttgactggcttatt

SEQ ID NO: 24642 - DNA, 35 bp, Artificial Sequence
  synthetic circulating small noncoding RNA (sncRNA) 5' YRNA-derived fragment
tggctggtccgatggtagtgggttatcagaactta

SEQ ID NO: 24643 - DNA, 26 bp, Artificial Sequence
  synthetic circulating small noncoding RNA (sncRNA) 5' YRNA-derived fragment
gataacccactaccattggacaagcc

SEQ ID NO: 24644 - DNA, 19 bp, Artificial Sequence
  synthetic circulating small noncoding RNA (sncRNA) 5' YRNA-derived fragment
cactaccttcggaccagcc

SEQ ID NO: 24645 - DNA, 29 bp, Artificial Sequence
  synthetic circulating small noncoding RNA (sncRNA) 5' YRNA-derived fragment
aggctagtcaagggaagcagtgggagtgg

SEQ ID NO: 24646 - DNA, 30 bp, Artificial Sequence
  synthetic circulating small noncoding RNA (sncRNA) 5' YRNA-derived fragment
ttgagataactcactacctttggaccagcc

SEQ ID NO: 24647 - DNA, 29 bp, Artificial Sequence
  synthetic circulating small noncoding RNA (sncRNA) 5' YRNA-derived fragment
cccccacaaccgcgcttgactagcttgct

SEQ ID NO: 24648 - DNA, 27 bp, Artificial Sequence
  synthetic circulating small noncoding RNA (sncRNA) 5' YRNA-derived fragment
tgataacccactaccatcggaccagtc

SEQ ID NO: 24649 - DNA, 33 bp, Artificial Sequence
  synthetic circulating small noncoding RNA (sncRNA) 5' YRNA-derived fragment
taataagttctgataacccactaccatcggacc

SEQ ID NO: 24650 - DNA, 38 bp, Artificial Sequence
  synthetic circulating small noncoding RNA (sncRNA) 5' YRNA-derived fragment
atcaattagttgtaaacaccactgcactcggaccagcc

SEQ ID NO: 24651 - DNA, 27 bp, Artificial Sequence
  synthetic circulating small noncoding RNA (sncRNA) 5' YRNA-derived fragment
ggtcctatggtagtgggttatcagaac

SEQ ID NO: 24652 - DNA, 21 bp, Artificial Sequence
  synthetic circulating small noncoding RNA (sncRNA) 5' YRNA-derived fragment
cccactaccatcggaccagcc

SEQ ID NO: 24653 - DNA, 28 bp, Artificial Sequence
  synthetic circulating small noncoding RNA (sncRNA) 5' YRNA-derived fragment
taagccagtcaaatttagcagtgagggg

SEQ ID NO: 24654 - DNA, 19 bp, Artificial Sequence
  synthetic circulating small noncoding RNA (sncRNA) 5' YRNA-derived fragment
gttctgataacccactacc

SEQ ID NO: 24655 - DNA, 34 bp, Artificial Sequence
  synthetic circulating small noncoding RNA (sncRNA) 5' YRNA-derived fragment
tacaaccccccactgctaaatttgactggcttta

SEQ ID NO: 24656 - DNA, 22 bp, Artificial Sequence
  synthetic circulating small noncoding RNA (sncRNA) 5' YRNA-derived fragment
acccactaccatcggaccagtc

SEQ ID NO: 24657 - DNA, 32 bp, Artificial Sequence
  synthetic circulating small noncoding RNA (sncRNA) 5' YRNA-derived fragment
aagccagtcaaatttagcagttgggggttgta

SEQ ID NO: 24658 - DNA, 24 bp, Artificial Sequence
  synthetic circulating small noncoding RNA (sncRNA) 5' YRNA-derived fragment
aggctagtcaagtgaagcagtggg

SEQ ID NO: 24659 - DNA, 18 bp, Artificial Sequence
  synthetic circulating small noncoding RNA (sncRNA) 5' YRNA-derived fragment
caaccgcgcttgactagc

SEQ ID NO: 24660 - DNA, 26 bp, Artificial Sequence
  synthetic circulating small noncoding RNA (sncRNA) 5' YRNA-derived fragment
tccccccacaaccgcgcttgactagc

SEQ ID NO: 24661 - DNA, 24 bp, Artificial Sequence
  synthetic circulating small noncoding RNA (sncRNA) 5' YRNA-derived fragment
cagtcaaatttagcagtggggggt

SEQ ID NO: 24662 - DNA, 26 bp, Artificial Sequence
  synthetic circulating small noncoding RNA (sncRNA) 5' YRNA-derived fragment
agccagtcaaatttagcagtggaggg

SEQ ID NO: 24663 - DNA, 19 bp, Artificial Sequence
  synthetic circulating small noncoding RNA (sncRNA) 5' YRNA-derived fragment
actttagtgacactaatgt

SEQ ID NO: 24664 - DNA, 23 bp, Artificial Sequence
  synthetic circulating small noncoding RNA (sncRNA) 5' YRNA-derived fragment
tcccactgcttcacttgactagt

SEQ ID NO: 24665 - DNA, 30 bp, Artificial Sequence
  synthetic circulating small noncoding RNA (sncRNA) 5' YRNA-derived fragment
taacaataacccacaacactcagaccaaca

SEQ ID NO: 24666 - DNA, 18 bp, Artificial Sequence
  synthetic circulating small noncoding RNA (sncRNA) 5' YRNA-derived fragment
gtgttgtgggttattgtt

SEQ ID NO: 24667 - DNA, 20 bp, Artificial Sequence
  synthetic circulating small noncoding RNA (sncRNA) 5' YRNA-derived fragment
ttctcactactgcacttgac

SEQ ID NO: 24668 - DNA, 25 bp, Artificial Sequence
  synthetic circulating small noncoding RNA (sncRNA) 5' YRNA-derived fragment
gataactcactaccttcggaccagc

SEQ ID NO: 24669 - DNA, 34 bp, Artificial Sequence
  synthetic circulating small noncoding RNA (sncRNA) 5' YRNA-derived fragment
tggtccgatggtagtgggttatcagaacttatta

SEQ ID NO: 24670 - DNA, 44 bp, Artificial Sequence
  synthetic circulating small noncoding RNA (sncRNA) 5' YRNA-derived fragment
ggctggtccgatggtagtgggttatcagaacttattaacattag

SEQ ID NO: 24671 - DNA, 23 bp, Artificial Sequence
  synthetic circulating small noncoding RNA (sncRNA) 5' YRNA-derived fragment
tcagtcaaatttagcagtggggg

SEQ ID NO: 24672 - DNA, 27 bp, Artificial Sequence
  synthetic circulating small noncoding RNA (sncRNA) 5' YRNA-derived fragment
caggctagtcaagtgaagcagtgggag

SEQ ID NO: 24673 - DNA, 28 bp, Artificial Sequence
  synthetic circulating small noncoding RNA (sncRNA) 5' YRNA-derived fragment
ggtccgatggtagtgggttaccagaact

SEQ ID NO: 24674 - DNA, 27 bp, Artificial Sequence
  synthetic circulating small noncoding RNA (sncRNA) 5' YRNA-derived fragment
ccccaactgctaaatttgactggcttt

SEQ ID NO: 24675 - DNA, 29 bp, Artificial Sequence
  synthetic circulating small noncoding RNA (sncRNA) 5' YRNA-derived fragment
gagttctgataacccactaccatcggacc

SEQ ID NO: 24676 - DNA, 44 bp, Artificial Sequence
  synthetic circulating small noncoding RNA (sncRNA) 5' YRNA-derived fragment
ggctggtccgatggtagtgggttatcagaacttattaacatttg

SEQ ID NO: 24677 - DNA, 29 bp, Artificial Sequence
  synthetic circulating small noncoding RNA (sncRNA) 5' YRNA-derived fragment
ccccccacaaccgcgcttgactagcttgc

SEQ ID NO: 24678 - DNA, 41 bp, Artificial Sequence
  synthetic circulating small noncoding RNA (sncRNA) 5' YRNA-derived fragment
aaccagtcaaatttagcagtggggggttgtataccaacttt

SEQ ID NO: 24679 - DNA, 35 bp, Artificial Sequence
  synthetic circulating small noncoding RNA (sncRNA) 5' YRNA-derived fragment
ggtccgatggtagtgggttatcagaacttattaac

SEQ ID NO: 24680 - DNA, 24 bp, Artificial Sequence
  synthetic circulating small noncoding RNA (sncRNA) 5' YRNA-derived fragment
aggctagtcaagggaagcagtggg

SEQ ID NO: 24681 - DNA, 25 bp, Artificial Sequence
  synthetic circulating small noncoding RNA (sncRNA) 5' YRNA-derived fragment
cgagtgttgtgggttattgttaagt

SEQ ID NO: 24682 - DNA, 39 bp, Artificial Sequence
  synthetic circulating small noncoding RNA (sncRNA) 5' YRNA-derived fragment
ttgttccttctccactcccactgcttcacttgactagcc

SEQ ID NO: 24683 - DNA, 27 bp, Artificial Sequence
  synthetic circulating small noncoding RNA (sncRNA) 5' YRNA-derived fragment
tgtctcactactgcacttgactagtct

SEQ ID NO: 24684 - DNA, 23 bp, Artificial Sequence
  synthetic circulating small noncoding RNA (sncRNA) 5' YRNA-derived fragment
gccagtcaaatttagcagtgggg

SEQ ID NO: 24685 - DNA, 34 bp, Artificial Sequence
  synthetic circulating small noncoding RNA (sncRNA) 5' YRNA-derived fragment
ggctggtccgagtgcagtggtgtttacaactaat

SEQ ID NO: 24686 - DNA, 25 bp, Artificial Sequence
  synthetic circulating small noncoding RNA (sncRNA) 5' YRNA-derived fragment
gactagtcaagtgcagtagtgagaa

SEQ ID NO: 24687 - DNA, 30 bp, Artificial Sequence
  synthetic circulating small noncoding RNA (sncRNA) 5' YRNA-derived fragment
aaccagtcaaatttagcagtggggggttgt

SEQ ID NO: 24688 - DNA, 30 bp, Artificial Sequence
  synthetic circulating small noncoding RNA (sncRNA) 5' YRNA-derived fragment
ggccggtctgaaggtagtgagttatctcaa

SEQ ID NO: 24689 - DNA, 43 bp, Artificial Sequence
  synthetic circulating small noncoding RNA (sncRNA) 5' YRNA-derived fragment
tttgttccttctccactcccactgcttcacttgactagccttt

SEQ ID NO: 24690 - DNA, 27 bp, Artificial Sequence
  synthetic circulating small noncoding RNA (sncRNA) 5' YRNA-derived fragment
aggctagtcaagtgaagcagtgggagt

SEQ ID NO: 24691 - DNA, 26 bp, Artificial Sequence
  synthetic circulating small noncoding RNA (sncRNA) 5' YRNA-derived fragment
aggctagtcaagtgaagcagtggggg

SEQ ID NO: 24692 - DNA, 31 bp, Artificial Sequence
  synthetic circulating small noncoding RNA (sncRNA) 5' YRNA-derived fragment
aagccagtcaaatttagcagtggggggctat

SEQ ID NO: 24693 - DNA, 18 bp, Artificial Sequence
  synthetic circulating small noncoding RNA (sncRNA) 5' YRNA-derived fragment
agttctgatagcccacta

SEQ ID NO: 24694 - DNA, 21 bp, Artificial Sequence
  synthetic circulating small noncoding RNA (sncRNA) 5' YRNA-derived fragment
ccccacaaccgcgcttgacta

SEQ ID NO: 24695 - DNA, 26 bp, Artificial Sequence
  synthetic circulating small noncoding RNA (sncRNA) 5' YRNA-derived fragment
tcccccctgctaaatttgactggcta

SEQ ID NO: 24696 - DNA, 28 bp, Artificial Sequence
  synthetic circulating small noncoding RNA (sncRNA) 5' YRNA-derived fragment
aaagacagtcaaatttagcagtggagag

SEQ ID NO: 24697 - DNA, 34 bp, Artificial Sequence
  synthetic circulating small noncoding RNA (sncRNA) 5' YRNA-derived fragment
taagttctgataacccactaccattggaccagcc

SEQ ID NO: 24698 - DNA, 26 bp, Artificial Sequence
  synthetic circulating small noncoding RNA (sncRNA) 5' YRNA-derived fragment
agccagtcaaatttagcagtgagggg

SEQ ID NO: 24699 - DNA, 40 bp, Artificial Sequence
  synthetic circulating small noncoding RNA (sncRNA) 5' YRNA-derived fragment
ggctggtccgatggtagcgggttatcagaacctattaaca

SEQ ID NO: 24700 - DNA, 34 bp, Artificial Sequence
  synthetic circulating small noncoding RNA (sncRNA) 5' YRNA-derived fragment
aaggctagtcaagtgaagcagtgggagtggagaa

SEQ ID NO: 24701 - DNA, 28 bp, Artificial Sequence
  synthetic circulating small noncoding RNA (sncRNA) 5' YRNA-derived fragment
ttgtctgatggtagtgggttatcagaac

SEQ ID NO: 24702 - DNA, 39 bp, Artificial Sequence
  synthetic circulating small noncoding RNA (sncRNA) 5' YRNA-derived fragment
ggctggtccgagtgcagtggtgtttacaactaattgatc

SEQ ID NO: 24703 - DNA, 38 bp, Artificial Sequence
  synthetic circulating small noncoding RNA (sncRNA) 5' YRNA-derived fragment
ttaataagttctgataacccactaccatcggaccagtc

SEQ ID NO: 24704 - DNA, 27 bp, Artificial Sequence
  synthetic circulating small noncoding RNA (sncRNA) 5' YRNA-derived fragment
tagccagtcaaatttagcagtgaagga

SEQ ID NO: 24705 - DNA, 20 bp, Artificial Sequence
  synthetic circulating small noncoding RNA (sncRNA) 5' YRNA-derived fragment
aagccagtcaaatttagcgg

SEQ ID NO: 24706 - DNA, 29 bp, Artificial Sequence
  synthetic circulating small noncoding RNA (sncRNA) 5' YRNA-derived fragment
gactggtccgaaggtagtgagttatctca

SEQ ID NO: 24707 - DNA, 32 bp, Artificial Sequence
  synthetic circulating small noncoding RNA (sncRNA) 5' YRNA-derived fragment
ggttggtcctgtggtagtgggttatcagaact

SEQ ID NO: 24708 - DNA, 28 bp, Artificial Sequence
  synthetic circulating small noncoding RNA (sncRNA) 5' YRNA-derived fragment
agttctgataaccccctaccatgggacc

SEQ ID NO: 24709 - DNA, 27 bp, Artificial Sequence
  synthetic circulating small noncoding RNA (sncRNA) 5' YRNA-derived fragment
aaaaccagtcaaatttagcagtagggg

SEQ ID NO: 24710 - DNA, 26 bp, Artificial Sequence
  synthetic circulating small noncoding RNA (sncRNA) 5' YRNA-derived fragment
accccccactgctaaatttgactggc

SEQ ID NO: 24711 - DNA, 31 bp, Artificial Sequence
  synthetic circulating small noncoding RNA (sncRNA) 5' YRNA-derived fragment
aaaccagtcaaatttagcagtggggggttgt

SEQ ID NO: 24712 - DNA, 18 bp, Artificial Sequence
  synthetic circulating small noncoding RNA (sncRNA) 5' YRNA-derived fragment
gagtgttgtgggttattg

SEQ ID NO: 24713 - DNA, 18 bp, Artificial Sequence
  synthetic circulating small noncoding RNA (sncRNA) 5' YRNA-derived fragment
agttctgataacccccta

SEQ ID NO: 24714 - DNA, 26 bp, Artificial Sequence
  synthetic circulating small noncoding RNA (sncRNA) 5' YRNA-derived fragment
ggctggtccgatggtagcgggttatc

SEQ ID NO: 24715 - DNA, 30 bp, Artificial Sequence
  synthetic circulating small noncoding RNA (sncRNA) 5' YRNA-derived fragment
gttctgataacccactaccattggaccacc

SEQ ID NO: 24716 - DNA, 27 bp, Artificial Sequence
  synthetic circulating small noncoding RNA (sncRNA) 5' YRNA-derived fragment
taaaccagtcaaatttagcagtggggg

SEQ ID NO: 24717 - DNA, 33 bp, Artificial Sequence
  synthetic circulating small noncoding RNA (sncRNA) 5' YRNA-derived fragment
aagttctgataacccactaccatcagaccagcc

SEQ ID NO: 24718 - DNA, 30 bp, Artificial Sequence
  synthetic circulating small noncoding RNA (sncRNA) 5' YRNA-derived fragment
ggctggtctgaaggtagtgagttatctcaa

SEQ ID NO: 24719 - DNA, 39 bp, Artificial Sequence
  synthetic circulating small noncoding RNA (sncRNA) 5' YRNA-derived fragment
aagttggtatacaaccccccactgctaaatttgactggc

SEQ ID NO: 24720 - DNA, 39 bp, Artificial Sequence
  synthetic circulating small noncoding RNA (sncRNA) 5' YRNA-derived fragment
gctggtcctatggtagtgggttatcagaacttattaact

SEQ ID NO: 24721 - DNA, 34 bp, Artificial Sequence
  synthetic circulating small noncoding RNA (sncRNA) 5' YRNA-derived fragment
taagttctgataacccactaccatcgaaccagcc

SEQ ID NO: 24722 - DNA, 32 bp, Artificial Sequence
  synthetic circulating small noncoding RNA (sncRNA) 5' YRNA-derived fragment
tgattgtctgaaggtagtgagttatctcaatt

SEQ ID NO: 24723 - DNA, 29 bp, Artificial Sequence
  synthetic circulating small noncoding RNA (sncRNA) 5' YRNA-derived fragment
ctcccactgcttcacttgactagcctttt

SEQ ID NO: 24724 - DNA, 28 bp, Artificial Sequence
  synthetic circulating small noncoding RNA (sncRNA) 5' YRNA-derived fragment
aagactagtcaagtgtagtagtgagaag

SEQ ID NO: 24725 - DNA, 25 bp, Artificial Sequence
  synthetic circulating small noncoding RNA (sncRNA) 5' YRNA-derived fragment
aagttctgataacccactaccatcg

SEQ ID NO: 24726 - DNA, 48 bp, Artificial Sequence
  synthetic circulating small noncoding RNA (sncRNA) 5' YRNA-derived fragment
agactagtcaagtgcagtagtgagaaggggggaaagagtagaacaagg

SEQ ID NO: 24727 - DNA, 24 bp, Artificial Sequence
  synthetic circulating small noncoding RNA (sncRNA) 5' YRNA-derived fragment
ccgagtgttgtgggttattgttaa

SEQ ID NO: 24728 - DNA, 32 bp, Artificial Sequence
  synthetic circulating small noncoding RNA (sncRNA) 5' YRNA-derived fragment
aaggctagtcaagtgaagcagtgggagtggag

SEQ ID NO: 24729 - DNA, 47 bp, Artificial Sequence
  synthetic circulating small noncoding RNA (sncRNA) 5' YRNA-derived fragment
gactagtcaagtgcagtagtgagaaggggggaaagagtagaacaagg

SEQ ID NO: 24730 - DNA, 22 bp, Artificial Sequence
  synthetic circulating small noncoding RNA (sncRNA) 5' YRNA-derived fragment
actttagtgacactaatgttaa

SEQ ID NO: 24731 - DNA, 29 bp, Artificial Sequence
  synthetic circulating small noncoding RNA (sncRNA) 5' YRNA-derived fragment
tacaaccccccactgctaaatttgactgg

SEQ ID NO: 24732 - DNA, 32 bp, Artificial Sequence
  synthetic circulating small noncoding RNA (sncRNA) 5' YRNA-derived fragment
aagccagtcaaatttagcagtggggtgttgta

SEQ ID NO: 24733 - DNA, 21 bp, Artificial Sequence
  synthetic circulating small noncoding RNA (sncRNA) 5' YRNA-derived fragment
aataagttctgataacccact

SEQ ID NO: 24734 - DNA, 28 bp, Artificial Sequence
  synthetic circulating small noncoding RNA (sncRNA) 5' YRNA-derived fragment
taagccagtcaaatttagcagtggaggg

SEQ ID NO: 24735 - DNA, 42 bp, Artificial Sequence
  synthetic circulating small noncoding RNA (sncRNA) 5' YRNA-derived fragment
gctggtccgatggtagtgggttatcagaacttattaacatta

SEQ ID NO: 24736 - DNA, 25 bp, Artificial Sequence
  synthetic circulating small noncoding RNA (sncRNA) 5' YRNA-derived fragment
aaccccccactgctaaatttgactg

SEQ ID NO: 24737 - DNA, 47 bp, Artificial Sequence
  synthetic circulating small noncoding RNA (sncRNA) 5' YRNA-derived fragment
ctagtcaagtgcagtagtgagaaggggggaaagagtagaacaaggag

SEQ ID NO: 24738 - DNA, 32 bp, Artificial Sequence
  synthetic circulating small noncoding RNA (sncRNA) 5' YRNA-derived fragment
agttctgataacccactatcattggaccaacc

SEQ ID NO: 24739 - DNA, 37 bp, Artificial Sequence
  synthetic circulating small noncoding RNA (sncRNA) 5' YRNA-derived fragment
ggctggtctgatggtagtgggttatcagagcttatta

SEQ ID NO: 24740 - DNA, 31 bp, Artificial Sequence
  synthetic circulating small noncoding RNA (sncRNA) 5' YRNA-derived fragment
atcgatataactcactaccttcggaccagcc

SEQ ID NO: 24741 - DNA, 25 bp, Artificial Sequence
  synthetic circulating small noncoding RNA (sncRNA) 5' YRNA-derived fragment
agctctgacaacccactaccatcgg

SEQ ID NO: 24742 - DNA, 32 bp, Artificial Sequence
  synthetic circulating small noncoding RNA (sncRNA) 5' YRNA-derived fragment
agctggttcgatggcagtgggttatcagaact

SEQ ID NO: 24743 - DNA, 29 bp, Artificial Sequence
  synthetic circulating small noncoding RNA (sncRNA) 5' YRNA-derived fragment
acaaccccccactgctaaatttgactggc

SEQ ID NO: 24744 - DNA, 24 bp, Artificial Sequence
  synthetic circulating small noncoding RNA (sncRNA) 5' YRNA-derived fragment
cgcccactgcttcacttgactagc

SEQ ID NO: 24745 - DNA, 26 bp, Artificial Sequence
  synthetic circulating small noncoding RNA (sncRNA) 5' YRNA-derived fragment
ggctggtccaatggtagtggtttatc

SEQ ID NO: 24746 - DNA, 40 bp, Artificial Sequence
  synthetic circulating small noncoding RNA (sncRNA) 5' YRNA-derived fragment
aaagttggtatacaaccccccactgctaaatttgactggc

SEQ ID NO: 24747 - DNA, 43 bp, Artificial Sequence
  synthetic circulating small noncoding RNA (sncRNA) 5' YRNA-derived fragment
agttggtccgagtgttgtgggttattgttaagttgatttaaca

SEQ ID NO: 24748 - DNA, 30 bp, Artificial Sequence
  synthetic circulating small noncoding RNA (sncRNA) 5' YRNA-derived fragment
ggctggtccaaaggtagtgagttatcccaa

SEQ ID NO: 24749 - DNA, 32 bp, Artificial Sequence
  synthetic circulating small noncoding RNA (sncRNA) 5' YRNA-derived fragment
aagccagtcaaatttagcagtggggggctata

SEQ ID NO: 24750 - DNA, 20 bp, Artificial Sequence
  synthetic circulating small noncoding RNA (sncRNA) 5' YRNA-derived fragment
cccacaaccgcgcttgacta

SEQ ID NO: 24751 - DNA, 23 bp, Artificial Sequence
  synthetic circulating small noncoding RNA (sncRNA) 5' YRNA-derived fragment
cactgcttcacttgactagcctt

SEQ ID NO: 24752 - DNA, 32 bp, Artificial Sequence
  synthetic circulating small noncoding RNA (sncRNA) 5' YRNA-derived fragment
ggctggtctgaaggtagtgagttagctcaatt

SEQ ID NO: 24753 - DNA, 29 bp, Artificial Sequence
  synthetic circulating small noncoding RNA (sncRNA) 5' YRNA-derived fragment
gatggtccgaaggtagtgagttatctcaa

SEQ ID NO: 24754 - DNA, 30 bp, Artificial Sequence
  synthetic circulating small noncoding RNA (sncRNA) 5' YRNA-derived fragment
ctgagataactcactacctttggacaagcc

SEQ ID NO: 24755 - DNA, 29 bp, Artificial Sequence
  synthetic circulating small noncoding RNA (sncRNA) 5' YRNA-derived fragment
cccccactgctaaatttgactggcttaaa

SEQ ID NO: 24756 - DNA, 26 bp, Artificial Sequence
  synthetic circulating small noncoding RNA (sncRNA) 5' YRNA-derived fragment
atttctgataacccactaccatcgga

SEQ ID NO: 24757 - DNA, 30 bp, Artificial Sequence
  synthetic circulating small noncoding RNA (sncRNA) 5' YRNA-derived fragment
taaaagccagtcaaatttagcagtgggggg

SEQ ID NO: 24758 - DNA, 27 bp, Artificial Sequence
  synthetic circulating small noncoding RNA (sncRNA) 5' YRNA-derived fragment
agccagtcaaatttagcagtggggggt

SEQ ID NO: 24759 - DNA, 36 bp, Artificial Sequence
  synthetic circulating small noncoding RNA (sncRNA) 5' YRNA-derived fragment
aataaattctgataacccactaccatcagaccagcc

SEQ ID NO: 24760 - DNA, 31 bp, Artificial Sequence
  synthetic circulating small noncoding RNA (sncRNA) 5' YRNA-derived fragment
ggccggtctgaaggtagtgagttatctcaat

SEQ ID NO: 24761 - DNA, 27 bp, Artificial Sequence
  synthetic circulating small noncoding RNA (sncRNA) 5' YRNA-derived fragment
gttctgataacccactaccattggaca

SEQ ID NO: 24762 - DNA, 30 bp, Artificial Sequence
  synthetic circulating small noncoding RNA (sncRNA) 5' YRNA-derived fragment
ccactcccactgcttcacttgactagccta

SEQ ID NO: 24763 - DNA, 26 bp, Artificial Sequence
  synthetic circulating small noncoding RNA (sncRNA) 5' YRNA-derived fragment
tataactcactaccttcggaccagcc

SEQ ID NO: 24764 - DNA, 26 bp, Artificial Sequence
  synthetic circulating small noncoding RNA (sncRNA) 5' YRNA-derived fragment
gataacccactaccatccgacaagcc

SEQ ID NO: 24765 - DNA, 37 bp, Artificial Sequence
  synthetic circulating small noncoding RNA (sncRNA) 5' YRNA-derived fragment
tcaattagttgtaaacaccactgcactcggaccagcc

SEQ ID NO: 24766 - DNA, 40 bp, Artificial Sequence
  synthetic circulating small noncoding RNA (sncRNA) 5' YRNA-derived fragment
cattaataagttctgataacccactaccatcgaaccagcc

SEQ ID NO: 24767 - DNA, 19 bp, Artificial Sequence
  synthetic circulating small noncoding RNA (sncRNA) 5' YRNA-derived fragment
ggctggtccgagtgcagtg

SEQ ID NO: 24768 - DNA, 35 bp, Artificial Sequence
  synthetic circulating small noncoding RNA (sncRNA) 5' YRNA-derived fragment
atgagttctgataacccactaccatcggaccagcc

SEQ ID NO: 24769 - DNA, 29 bp, Artificial Sequence
  synthetic circulating small noncoding RNA (sncRNA) 5' YRNA-derived fragment
ttagccagtcagattttagcagtgggggg

SEQ ID NO: 24770 - DNA, 28 bp, Artificial Sequence
  synthetic circulating small noncoding RNA (sncRNA) 5' YRNA-derived fragment
aaaggcagtcaaatttagcagtgggggt

SEQ ID NO: 24771 - DNA, 26 bp, Artificial Sequence
  synthetic circulating small noncoding RNA (sncRNA) 5' YRNA-derived fragment
aagctagtcaagtgaagcagtgggag

SEQ ID NO: 24772 - DNA, 39 bp, Artificial Sequence
  synthetic circulating small noncoding RNA (sncRNA) 5' YRNA-derived fragment
gttaataagttctgataacccactaccatccgacaagcc

SEQ ID NO: 24773 - DNA, 23 bp, Artificial Sequence
  synthetic circulating small noncoding RNA (sncRNA) 5' YRNA-derived fragment
agccagtcaaatttagcagtggg

SEQ ID NO: 24774 - DNA, 30 bp, Artificial Sequence
  synthetic circulating small noncoding RNA (sncRNA) 5' YRNA-derived fragment
aaggctagtcaagggaagcagtgggagtgg

SEQ ID NO: 24775 - DNA, 44 bp, Artificial Sequence
  synthetic circulating small noncoding RNA (sncRNA) 5' YRNA-derived fragment
tctttgttccttctccactcccactgcttcacttgactagcctt

SEQ ID NO: 24776 - DNA, 20 bp, Artificial Sequence
  synthetic circulating small noncoding RNA (sncRNA) 5' YRNA-derived fragment
ccccccacaaccgcgcttga

SEQ ID NO: 24777 - DNA, 18 bp, Artificial Sequence
  synthetic circulating small noncoding RNA (sncRNA) 5' YRNA-derived fragment
cagccagtcaaatttagc

SEQ ID NO: 24778 - DNA, 40 bp, Artificial Sequence
  synthetic circulating small noncoding RNA (sncRNA) 5' YRNA-derived fragment
ctactctttccccccttctcactactgcacttgactagtc

SEQ ID NO: 24779 - DNA, 30 bp, Artificial Sequence
  synthetic circulating small noncoding RNA (sncRNA) 5' YRNA-derived fragment
aaaccagtcaaatttagcagtggggggttg

SEQ ID NO: 24780 - DNA, 21 bp, Artificial Sequence
  synthetic circulating small noncoding RNA (sncRNA) 5' YRNA-derived fragment
tagccagtcaaatttagcagt

SEQ ID NO: 24781 - DNA, 23 bp, Artificial Sequence
  synthetic circulating small noncoding RNA (sncRNA) 5' YRNA-derived fragment
ctagtcaagtggagtagtgagaa

SEQ ID NO: 24782 - DNA, 31 bp, Artificial Sequence
  synthetic circulating small noncoding RNA (sncRNA) 5' YRNA-derived fragment
ccactcccactgcttcacttgactagccttt

SEQ ID NO: 24783 - DNA, 39 bp, Artificial Sequence
  synthetic circulating small noncoding RNA (sncRNA) 5' YRNA-derived fragment
ggctggtcagatggtagtgggttatcagaacttattaac

SEQ ID NO: 24784 - DNA, 38 bp, Artificial Sequence
  synthetic circulating small noncoding RNA (sncRNA) 5' YRNA-derived fragment
tggctggtccgatggtagtgggttatcagaacttatta

SEQ ID NO: 24785 - DNA, 30 bp, Artificial Sequence
  synthetic circulating small noncoding RNA (sncRNA) 5' YRNA-derived fragment
aaggctagtcaagtgaagcagtgggagtgg

SEQ ID NO: 24786 - DNA, 20 bp, Artificial Sequence
  synthetic circulating small noncoding RNA (sncRNA) 5' YRNA-derived fragment
ctgctaaatttgactggcta

SEQ ID NO: 24787 - DNA, 25 bp, Artificial Sequence
  synthetic circulating small noncoding RNA (sncRNA) 5' YRNA-derived fragment
gactagtcaagtgaagcagtgggag

SEQ ID NO: 24788 - DNA, 40 bp, Artificial Sequence
  synthetic circulating small noncoding RNA (sncRNA) 5' YRNA-derived fragment
aagttggtatacaaccccccactgctaaatttgactggct

SEQ ID NO: 24789 - DNA, 22 bp, Artificial Sequence
  synthetic circulating small noncoding RNA (sncRNA) 5' YRNA-derived fragment
tagccagtcagattttagcagt

SEQ ID NO: 24790 - DNA, 29 bp, Artificial Sequence
  synthetic circulating small noncoding RNA (sncRNA) 5' YRNA-derived fragment
ccgatggtagtgggttatcagaacttatt

SEQ ID NO: 24791 - DNA, 26 bp, Artificial Sequence
  synthetic circulating small noncoding RNA (sncRNA) 5' YRNA-derived fragment
agactagtcaagtgtagtagtgagaa

SEQ ID NO: 24792 - DNA, 41 bp, Artificial Sequence
  synthetic circulating small noncoding RNA (sncRNA) 5' YRNA-derived fragment
atattaataagttctgataacccactaccatcagaccagcc

SEQ ID NO: 24793 - DNA, 33 bp, Artificial Sequence
  synthetic circulating small noncoding RNA (sncRNA) 5' YRNA-derived fragment
ggcttttccgatggtagtgggttatctgaactt

SEQ ID NO: 24794 - DNA, 28 bp, Artificial Sequence
  synthetic circulating small noncoding RNA (sncRNA) 5' YRNA-derived fragment
ctgataacccactaccatccgacaagcc

SEQ ID NO: 24795 - DNA, 32 bp, Artificial Sequence
  synthetic circulating small noncoding RNA (sncRNA) 5' YRNA-derived fragment
agctggtctgatggtagtgggttatcaggact

SEQ ID NO: 24796 - DNA, 47 bp, Artificial Sequence
  synthetic circulating small noncoding RNA (sncRNA) 5' YRNA-derived fragment
agttggtccgagtgttgtgggttattgttaagttgatttaacattgt

SEQ ID NO: 24797 - DNA, 37 bp, Artificial Sequence
  synthetic circulating small noncoding RNA (sncRNA) 5' YRNA-derived fragment
ggctggtccaatggtagtggtttatcagaacttattc

SEQ ID NO: 24798 - DNA, 31 bp, Artificial Sequence
  synthetic circulating small noncoding RNA (sncRNA) 5' YRNA-derived fragment
agttctgataacccactaccatcgaaccagc

SEQ ID NO: 24799 - DNA, 30 bp, Artificial Sequence
  synthetic circulating small noncoding RNA (sncRNA) 5' YRNA-derived fragment
tcgatataactcactaccttcggaccagcc

SEQ ID NO: 24800 - DNA, 31 bp, Artificial Sequence
  synthetic circulating small noncoding RNA (sncRNA) 5' YRNA-derived fragment
agttctgataacccactactatcggaccagc

SEQ ID NO: 24801 - DNA, 31 bp, Artificial Sequence
  synthetic circulating small noncoding RNA (sncRNA) 5' YRNA-derived fragment
ttttaagccagtcaaatttagcagtgggggg

SEQ ID NO: 24802 - DNA, 26 bp, Artificial Sequence
  synthetic circulating small noncoding RNA (sncRNA) 5' YRNA-derived fragment
ggctggtcctatggtagtgggttatc

SEQ ID NO: 24803 - DNA, 21 bp, Artificial Sequence
  synthetic circulating small noncoding RNA (sncRNA) 5' YRNA-derived fragment
ccccccacaaccgcgcttgac

SEQ ID NO: 24804 - DNA, 20 bp, Artificial Sequence
  synthetic circulating small noncoding RNA (sncRNA) 5' YRNA-derived fragment
agttctgagaacccaatacc

SEQ ID NO: 24805 - DNA, 36 bp, Artificial Sequence
  synthetic circulating small noncoding RNA (sncRNA) 5' YRNA-derived fragment
tccttctccactcccactgcttcacttgactagcct

SEQ ID NO: 24806 - DNA, 21 bp, Artificial Sequence
  synthetic circulating small noncoding RNA (sncRNA) 5' YRNA-derived fragment
actcccactgcttcacttgac

SEQ ID NO: 24807 - DNA, 25 bp, Artificial Sequence
  synthetic circulating small noncoding RNA (sncRNA) 5' YRNA-derived fragment
ctcccactgcttcacttgactagaa

SEQ ID NO: 24808 - DNA, 18 bp, Artificial Sequence
  synthetic circulating small noncoding RNA (sncRNA) 5' YRNA-derived fragment
gctaaatttgactggcta

SEQ ID NO: 24809 - DNA, 29 bp, Artificial Sequence
  synthetic circulating small noncoding RNA (sncRNA) 5' YRNA-derived fragment
tttgataacccactaccatcagaccagcc

SEQ ID NO: 24810 - DNA, 26 bp, Artificial Sequence
  synthetic circulating small noncoding RNA (sncRNA) 5' YRNA-derived fragment
ggctggtccgatggtagtgatttatc

SEQ ID NO: 24811 - DNA, 18 bp, Artificial Sequence
  synthetic circulating small noncoding RNA (sncRNA) 5' YRNA-derived fragment
ccgcgcttgactagcttg

SEQ ID NO: 24812 - DNA, 39 bp, Artificial Sequence
  synthetic circulating small noncoding RNA (sncRNA) 5' YRNA-derived fragment
ggctggtcctatggtagtgggttatcagaacttattaac

SEQ ID NO: 24813 - DNA, 36 bp, Artificial Sequence
  synthetic circulating small noncoding RNA (sncRNA) 5' YRNA-derived fragment
tacaaccccccactgctaaatttgactggcttttta

SEQ ID NO: 24814 - DNA, 26 bp, Artificial Sequence
  synthetic circulating small noncoding RNA (sncRNA) 5' YRNA-derived fragment
ttggtccgagtgttgtgggttattgt

SEQ ID NO: 24815 - DNA, 23 bp, Artificial Sequence
  synthetic circulating small noncoding RNA (sncRNA) 5' YRNA-derived fragment
tcccactgcttcacttgactaga

SEQ ID NO: 24816 - DNA, 33 bp, Artificial Sequence
  synthetic circulating small noncoding RNA (sncRNA) 5' YRNA-derived fragment
ggctggtccaatgatagtgggttatcagaactt

SEQ ID NO: 24817 - DNA, 31 bp, Artificial Sequence
  synthetic circulating small noncoding RNA (sncRNA) 5' YRNA-derived fragment
gttctgataacccactaccattggaccaccc

SEQ ID NO: 24818 - DNA, 26 bp, Artificial Sequence
  synthetic circulating small noncoding RNA (sncRNA) 5' YRNA-derived fragment
cgatggtagtgggttatcagaactta

SEQ ID NO: 24819 - DNA, 31 bp, Artificial Sequence
  synthetic circulating small noncoding RNA (sncRNA) 5' YRNA-derived fragment
attgagataactcactacctttggaccagcc

SEQ ID NO: 24820 - DNA, 23 bp, Artificial Sequence
  synthetic circulating small noncoding RNA (sncRNA) 5' YRNA-derived fragment
ctagtccagtgcagtagtgagaa

SEQ ID NO: 24821 - DNA, 25 bp, Artificial Sequence
  synthetic circulating small noncoding RNA (sncRNA) 5' YRNA-derived fragment
tactagtcaagtgaaacagtgggag

SEQ ID NO: 24822 - DNA, 20 bp, Artificial Sequence
  synthetic circulating small noncoding RNA (sncRNA) 5' YRNA-derived fragment
cagtcaaatttagcagtggg

SEQ ID NO: 24823 - DNA, 21 bp, Artificial Sequence
  synthetic circulating small noncoding RNA (sncRNA) 5' YRNA-derived fragment
attgctaaatttgactggctt

SEQ ID NO: 24824 - DNA, 39 bp, Artificial Sequence
  synthetic circulating small noncoding RNA (sncRNA) 5' YRNA-derived fragment
gttccttctccactcccactgcttcacttgactagcctt

SEQ ID NO: 24825 - DNA, 39 bp, Artificial Sequence
  synthetic circulating small noncoding RNA (sncRNA) 5' YRNA-derived fragment
tgttccttctccactcccactgcttcacttgactagcct

SEQ ID NO: 24826 - DNA, 32 bp, Artificial Sequence
  synthetic circulating small noncoding RNA (sncRNA) 5' YRNA-derived fragment
ggctgctctgatggtagtaggttatcagaact

SEQ ID NO: 24827 - DNA, 31 bp, Artificial Sequence
  synthetic circulating small noncoding RNA (sncRNA) 5' YRNA-derived fragment
ccccccactgctaaatttgactggctttaaa

SEQ ID NO: 24828 - DNA, 18 bp, Artificial Sequence
  synthetic circulating small noncoding RNA (sncRNA) 5' YRNA-derived fragment
actacctttggaccagac

SEQ ID NO: 24829 - DNA, 30 bp, Artificial Sequence
  synthetic circulating small noncoding RNA (sncRNA) 5' YRNA-derived fragment
ggctggttcgaaggtagtcagttatctcaa

SEQ ID NO: 24830 - DNA, 21 bp, Artificial Sequence
  synthetic circulating small noncoding RNA (sncRNA) 5' YRNA-derived fragment
tcccactgcttcacttgacta

SEQ ID NO: 24831 - DNA, 18 bp, Artificial Sequence
  synthetic circulating small noncoding RNA (sncRNA) 5' YRNA-derived fragment
cgatggtagtgggttatc

SEQ ID NO: 24832 - DNA, 28 bp, Artificial Sequence
  synthetic circulating small noncoding RNA (sncRNA) 5' YRNA-derived fragment
ccccccacaactaaatttgactggcttt

SEQ ID NO: 24833 - DNA, 28 bp, Artificial Sequence
  synthetic circulating small noncoding RNA (sncRNA) 5' YRNA-derived fragment
ggctggtccaatggtagtggtttatcag

SEQ ID NO: 24834 - DNA, 23 bp, Artificial Sequence
  synthetic circulating small noncoding RNA (sncRNA) 5' YRNA-derived fragment
aacccactaccatcggaccagtc

SEQ ID NO: 24835 - DNA, 33 bp, Artificial Sequence
  synthetic circulating small noncoding RNA (sncRNA) 5' YRNA-derived fragment
gcttaacaataacccacaacactcagaccaaca

SEQ ID NO: 24836 - DNA, 32 bp, Artificial Sequence
  synthetic circulating small noncoding RNA (sncRNA) 5' YRNA-derived fragment
gactggtccgaaggtagtgagttatctcagtt

SEQ ID NO: 24837 - DNA, 29 bp, Artificial Sequence
  synthetic circulating small noncoding RNA (sncRNA) 5' YRNA-derived fragment
actcccactgcttcacttgactagccttt

SEQ ID NO: 24838 - DNA, 29 bp, Artificial Sequence
  synthetic circulating small noncoding RNA (sncRNA) 5' YRNA-derived fragment
agttctgataacccactaccattggacaa

SEQ ID NO: 24839 - DNA, 29 bp, Artificial Sequence
  synthetic circulating small noncoding RNA (sncRNA) 5' YRNA-derived fragment
cttctcactactgcacttgactagtctta

SEQ ID NO: 24840 - DNA, 30 bp, Artificial Sequence
  synthetic circulating small noncoding RNA (sncRNA) 5' YRNA-derived fragment
aattgagataactcactaccttcggaccag

SEQ ID NO: 24841 - DNA, 25 bp, Artificial Sequence
  synthetic circulating small noncoding RNA (sncRNA) 5' YRNA-derived fragment
aaggctagtcaagtgaagcagtggg

SEQ ID NO: 24842 - DNA, 32 bp, Artificial Sequence
  synthetic circulating small noncoding RNA (sncRNA) 5' YRNA-derived fragment
cggctggtccgatggtagtgggttatcagaac

SEQ ID NO: 24843 - DNA, 25 bp, Artificial Sequence
  synthetic circulating small noncoding RNA (sncRNA) 5' YRNA-derived fragment
agttctgataacctactaccatcgg

SEQ ID NO: 24844 - DNA, 19 bp, Artificial Sequence
  synthetic circulating small noncoding RNA (sncRNA) 5' YRNA-derived fragment
ccccacaaccgcgcttgac

SEQ ID NO: 24845 - DNA, 23 bp, Artificial Sequence
  synthetic circulating small noncoding RNA (sncRNA) 5' YRNA-derived fragment
tccgagtgttgtgggttattgtt

SEQ ID NO: 24846 - DNA, 20 bp, Artificial Sequence
  synthetic circulating small noncoding RNA (sncRNA) 5' YRNA-derived fragment
tggtagtgggttatcagaac

SEQ ID NO: 24847 - DNA, 27 bp, Artificial Sequence
  synthetic circulating small noncoding RNA (sncRNA) 5' YRNA-derived fragment
ttctcactactgcacttgactagtctg

SEQ ID NO: 24848 - DNA, 33 bp, Artificial Sequence
  synthetic circulating small noncoding RNA (sncRNA) 5' YRNA-derived fragment
aaattctgataacccactaccatcagaccagcc

SEQ ID NO: 24849 - DNA, 23 bp, Artificial Sequence
  synthetic circulating small noncoding RNA (sncRNA) 5' YRNA-derived fragment
cgaaggtagtgagttatctcaat

SEQ ID NO: 24850 - DNA, 24 bp, Artificial Sequence
  synthetic circulating small noncoding RNA (sncRNA) 5' YRNA-derived fragment
attagtgtcactaaagttggtata

SEQ ID NO: 24851 - DNA, 20 bp, Artificial Sequence
  synthetic circulating small noncoding RNA (sncRNA) 5' YRNA-derived fragment
ctcccactgcttcacttgac

SEQ ID NO: 24852 - DNA, 45 bp, Artificial Sequence
  synthetic circulating small noncoding RNA (sncRNA) 5' YRNA-derived fragment
ctagtcaagtgcagtagtgagaaggggggaaagagtagaacaagg

SEQ ID NO: 24853 - DNA, 32 bp, Artificial Sequence
  synthetic circulating small noncoding RNA (sncRNA) 5' YRNA-derived fragment
gagttctgataacccactaccatcggaccagc

SEQ ID NO: 24854 - DNA, 36 bp, Artificial Sequence
  synthetic circulating small noncoding RNA (sncRNA) 5' YRNA-derived fragment
ggctggtccgatggtagcaggttatcagaacttatt

SEQ ID NO: 24855 - DNA, 32 bp, Artificial Sequence
  synthetic circulating small noncoding RNA (sncRNA) 5' YRNA-derived fragment
caaccccccactgctaaatttgactggctttt

SEQ ID NO: 24856 - DNA, 25 bp, Artificial Sequence
  synthetic circulating small noncoding RNA (sncRNA) 5' YRNA-derived fragment
ccaatggtagtggtttatcagaact

SEQ ID NO: 24857 - DNA, 26 bp, Artificial Sequence
  synthetic circulating small noncoding RNA (sncRNA) 5' YRNA-derived fragment
ccccccactgctaaattttactagct

SEQ ID NO: 24858 - DNA, 30 bp, Artificial Sequence
  synthetic circulating small noncoding RNA (sncRNA) 5' YRNA-derived fragment
gttctgataacccactaccatcgaaccagc

SEQ ID NO: 24859 - DNA, 20 bp, Artificial Sequence
  synthetic circulating small noncoding RNA (sncRNA) 5' YRNA-derived fragment
gtcaagtgcagtagtgagaa

SEQ ID NO: 24860 - DNA, 20 bp, Artificial Sequence
  synthetic circulating small noncoding RNA (sncRNA) 5' YRNA-derived fragment
ccactaccatcggaccagcc

SEQ ID NO: 24861 - DNA, 18 bp, Artificial Sequence
  synthetic circulating small noncoding RNA (sncRNA) 5' YRNA-derived fragment
actaccatcggaccagtc

SEQ ID NO: 24862 - DNA, 31 bp, Artificial Sequence
  synthetic circulating small noncoding RNA (sncRNA) 5' YRNA-derived fragment
ggctggtctgaaggtagtgagttatctcaat

SEQ ID NO: 24863 - DNA, 22 bp, Artificial Sequence
  synthetic circulating small noncoding RNA (sncRNA) 5' YRNA-derived fragment
ggcttttccgatggtagtgggt

SEQ ID NO: 24864 - DNA, 22 bp, Artificial Sequence
  synthetic circulating small noncoding RNA (sncRNA) 5' YRNA-derived fragment
cacaaccgcgcttgactagctt

SEQ ID NO: 24865 - DNA, 29 bp, Artificial Sequence
  synthetic circulating small noncoding RNA (sncRNA) 5' YRNA-derived fragment
tctgataacccactaccattggacaagcc

SEQ ID NO: 24866 - DNA, 32 bp, Artificial Sequence
  synthetic circulating small noncoding RNA (sncRNA) 5' YRNA-derived fragment
gccagtcaaatttagcagtggggggttgtata

SEQ ID NO: 24867 - DNA, 30 bp, Artificial Sequence
  synthetic circulating small noncoding RNA (sncRNA) 5' YRNA-derived fragment
tcctggtccgaatgtaatgagttatctcaa

SEQ ID NO: 24868 - DNA, 30 bp, Artificial Sequence
  synthetic circulating small noncoding RNA (sncRNA) 5' YRNA-derived fragment
ggctggtctgatggtagtgggttatcagtg

SEQ ID NO: 24869 - DNA, 26 bp, Artificial Sequence
  synthetic circulating small noncoding RNA (sncRNA) 5' YRNA-derived fragment
ttcgatggcagtgggttatcagaact

SEQ ID NO: 24870 - DNA, 30 bp, Artificial Sequence
  synthetic circulating small noncoding RNA (sncRNA) 5' YRNA-derived fragment
ttgagataactcactaccttcagaccagtc

SEQ ID NO: 24871 - DNA, 20 bp, Artificial Sequence
  synthetic circulating small noncoding RNA (sncRNA) 5' YRNA-derived fragment
tagtgggttatcagaactta

SEQ ID NO: 24872 - DNA, 19 bp, Artificial Sequence
  synthetic circulating small noncoding RNA (sncRNA) 5' YRNA-derived fragment
gtagtgggttatcagaaat

SEQ ID NO: 24873 - DNA, 45 bp, Artificial Sequence
  synthetic circulating small noncoding RNA (sncRNA) 5' YRNA-derived fragment
cagccagtcaaatttagcagtggggggttgtataccaactttagt

SEQ ID NO: 24874 - DNA, 36 bp, Artificial Sequence
  synthetic circulating small noncoding RNA (sncRNA) 5' YRNA-derived fragment
gataagttctgataacccactactatcggaccagcc

SEQ ID NO: 24875 - DNA, 21 bp, Artificial Sequence
  synthetic circulating small noncoding RNA (sncRNA) 5' YRNA-derived fragment
aagccagtaaaatttagcagt

SEQ ID NO: 24876 - DNA, 25 bp, Artificial Sequence
  synthetic circulating small noncoding RNA (sncRNA) 5' YRNA-derived fragment
cgcccactgcttcacttgactagcc

SEQ ID NO: 24877 - DNA, 39 bp, Artificial Sequence
  synthetic circulating small noncoding RNA (sncRNA) 5' YRNA-derived fragment
gttaataagttctgatgacccactaccatcggaccagcc

SEQ ID NO: 24878 - DNA, 21 bp, Artificial Sequence
  synthetic circulating small noncoding RNA (sncRNA) 5' YRNA-derived fragment
caaccgcgcttgactagcttg

SEQ ID NO: 24879 - DNA, 18 bp, Artificial Sequence
  synthetic circulating small noncoding RNA (sncRNA) 5' YRNA-derived fragment
actgcttcacttgactag

SEQ ID NO: 24880 - DNA, 24 bp, Artificial Sequence
  synthetic circulating small noncoding RNA (sncRNA) 5' YRNA-derived fragment
ggtccgatggtagtgggttatcag

SEQ ID NO: 24881 - DNA, 33 bp, Artificial Sequence
  synthetic circulating small noncoding RNA (sncRNA) 5' YRNA-derived fragment
acaaccccccactgctaaatttgactggctttt

SEQ ID NO: 24882 - DNA, 27 bp, Artificial Sequence
  synthetic circulating small noncoding RNA (sncRNA) 5' YRNA-derived fragment
aaggctagtcaagtgaagcagtggggg

SEQ ID NO: 24883 - DNA, 31 bp, Artificial Sequence
  synthetic circulating small noncoding RNA (sncRNA) 5' YRNA-derived fragment
aggctagtcaagtgaagcagtgggagtggag

SEQ ID NO: 24884 - DNA, 30 bp, Artificial Sequence
  synthetic circulating small noncoding RNA (sncRNA) 5' YRNA-derived fragment
ttctgataacccactaccattggacaagcc

SEQ ID NO: 24885 - DNA, 40 bp, Artificial Sequence
  synthetic circulating small noncoding RNA (sncRNA) 5' YRNA-derived fragment
aaggctagtcaagtgaagcagtgggagtggagaaggaaca

SEQ ID NO: 24886 - DNA, 42 bp, Artificial Sequence
  synthetic circulating small noncoding RNA (sncRNA) 5' YRNA-derived fragment
tttgttccttctccactcccactgcttcacttgactagcctt

SEQ ID NO: 24887 - DNA, 28 bp, Artificial Sequence
  synthetic circulating small noncoding RNA (sncRNA) 5' YRNA-derived fragment
ttagtgacacaaatgtgaataagttctg

SEQ ID NO: 24888 - DNA, 21 bp, Artificial Sequence
  synthetic circulating small noncoding RNA (sncRNA) 5' YRNA-derived fragment
gttctgataacccactaccat

SEQ ID NO: 24889 - DNA, 36 bp, Artificial Sequence
  synthetic circulating small noncoding RNA (sncRNA) 5' YRNA-derived fragment
ggctggtctgatggtagtgggttatcagaatttatt

SEQ ID NO: 24890 - DNA, 31 bp, Artificial Sequence
  synthetic circulating small noncoding RNA (sncRNA) 5' YRNA-derived fragment
ggctggtcccaaggtagtgacttatctcaat

SEQ ID NO: 24891 - DNA, 30 bp, Artificial Sequence
  synthetic circulating small noncoding RNA (sncRNA) 5' YRNA-derived fragment
tatacaaccccccactgctaaatttgactg

SEQ ID NO: 24892 - DNA, 20 bp, Artificial Sequence
  synthetic circulating small noncoding RNA (sncRNA) 5' YRNA-derived fragment
agttggtccgagtgttgtgg

SEQ ID NO: 24893 - DNA, 30 bp, Artificial Sequence
  synthetic circulating small noncoding RNA (sncRNA) 5' YRNA-derived fragment
ggctggtccaatggtagtggtttatcagaa

SEQ ID NO: 24894 - DNA, 41 bp, Artificial Sequence
  synthetic circulating small noncoding RNA (sncRNA) 5' YRNA-derived fragment
ctttgttccttctccactcccactgcttcacttgactagcc

SEQ ID NO: 24895 - DNA, 38 bp, Artificial Sequence
  synthetic circulating small noncoding RNA (sncRNA) 5' YRNA-derived fragment
ttccttctccactcccactgcttcacttgactagccta

SEQ ID NO: 24896 - DNA, 28 bp, Artificial Sequence
  synthetic circulating small noncoding RNA (sncRNA) 5' YRNA-derived fragment
aaagccagtcaaatttagcagtagggga

SEQ ID NO: 24897 - DNA, 30 bp, Artificial Sequence
  synthetic circulating small noncoding RNA (sncRNA) 5' YRNA-derived fragment
ctgagataactcactaccttcagaccagcc

SEQ ID NO: 24898 - DNA, 27 bp, Artificial Sequence
  synthetic circulating small noncoding RNA (sncRNA) 5' YRNA-derived fragment
aaccagtcaaatttagcagtggggggt

SEQ ID NO: 24899 - DNA, 29 bp, Artificial Sequence
  synthetic circulating small noncoding RNA (sncRNA) 5' YRNA-derived fragment
agccagtcaaatttagcagtggggggttg

SEQ ID NO: 24900 - DNA, 29 bp, Artificial Sequence
  synthetic circulating small noncoding RNA (sncRNA) 5' YRNA-derived fragment
ggctggtccaatggtagtggtttatcaga

SEQ ID NO: 24901 - DNA, 40 bp, Artificial Sequence
  synthetic circulating small noncoding RNA (sncRNA) 5' YRNA-derived fragment
ggctggtcagatggtagtgggttatcagaacttattaaca

SEQ ID NO: 24902 - DNA, 31 bp, Artificial Sequence
  synthetic circulating small noncoding RNA (sncRNA) 5' YRNA-derived fragment
cagccagtcaaatttagcagtggggggttgt

SEQ ID NO: 24903 - DNA, 20 bp, Artificial Sequence
  synthetic circulating small noncoding RNA (sncRNA) 5' YRNA-derived fragment
cttctcactactgcacttga

SEQ ID NO: 24904 - DNA, 40 bp, Artificial Sequence
  synthetic circulating small noncoding RNA (sncRNA) 5' YRNA-derived fragment
ggctggtccgagtgcagtggtgtttacaactaattgatca

SEQ ID NO: 24905 - DNA, 27 bp, Artificial Sequence
  synthetic circulating small noncoding RNA (sncRNA) 5' YRNA-derived fragment
ttccgatggtagtgggttatctgaact

SEQ ID NO: 24906 - DNA, 21 bp, Artificial Sequence
  synthetic circulating small noncoding RNA (sncRNA) 5' YRNA-derived fragment
aaaccagtcaaatttagcagt

SEQ ID NO: 24907 - DNA, 28 bp, Artificial Sequence
  synthetic circulating small noncoding RNA (sncRNA) 5' YRNA-derived fragment
tcccccactgctaaatttgactggctta

SEQ ID NO: 24908 - DNA, 30 bp, Artificial Sequence
  synthetic circulating small noncoding RNA (sncRNA) 5' YRNA-derived fragment
ccccccactgctaaatttgactggctttta

SEQ ID NO: 24909 - DNA, 29 bp, Artificial Sequence
  synthetic circulating small noncoding RNA (sncRNA) 5' YRNA-derived fragment
ggctggtccgatggtagtgggttaccaga

SEQ ID NO: 24910 - DNA, 37 bp, Artificial Sequence
  synthetic circulating small noncoding RNA (sncRNA) 5' YRNA-derived fragment
tggctggtccgatggtagtgggttatcagaacttatt

SEQ ID NO: 24911 - DNA, 28 bp, Artificial Sequence
  synthetic circulating small noncoding RNA (sncRNA) 5' YRNA-derived fragment
aaagccagccaaatttcgcagtgggggg

SEQ ID NO: 24912 - DNA, 32 bp, Artificial Sequence
  synthetic circulating small noncoding RNA (sncRNA) 5' YRNA-derived fragment
gactggtccgaaggtagtgagttatgtcaatt

SEQ ID NO: 24913 - DNA, 33 bp, Artificial Sequence
  synthetic circulating small noncoding RNA (sncRNA) 5' YRNA-derived fragment
tcagccagtcaaatttagcagtggggggttgta

SEQ ID NO: 24914 - DNA, 31 bp, Artificial Sequence
  synthetic circulating small noncoding RNA (sncRNA) 5' YRNA-derived fragment
ggctggtctgaaggtagtgagttatctcaac

SEQ ID NO: 24915 - DNA, 20 bp, Artificial Sequence
  synthetic circulating small noncoding RNA (sncRNA) 5' YRNA-derived fragment
cagaacttattaacattagt

SEQ ID NO: 24916 - DNA, 22 bp, Artificial Sequence
  synthetic circulating small noncoding RNA (sncRNA) 5' YRNA-derived fragment
gcccactgcttcacttgactag

SEQ ID NO: 24917 - DNA, 28 bp, Artificial Sequence
  synthetic circulating small noncoding RNA (sncRNA) 5' YRNA-derived fragment
cttctcactactgcacttgactagtcta

SEQ ID NO: 24918 - DNA, 23 bp, Artificial Sequence
  synthetic circulating small noncoding RNA (sncRNA) 5' YRNA-derived fragment
gtctcactactgcacttgactag

SEQ ID NO: 24919 - DNA, 32 bp, Artificial Sequence
  synthetic circulating small noncoding RNA (sncRNA) 5' YRNA-derived fragment
atctcaattgattgttcacagtcagttacaga

SEQ ID NO: 24920 - DNA, 31 bp, Artificial Sequence
  synthetic circulating small noncoding RNA (sncRNA) 5' YRNA-derived fragment
ccccccactgctaaatttgactggctttaat

SEQ ID NO: 24921 - DNA, 41 bp, Artificial Sequence
  synthetic circulating small noncoding RNA (sncRNA) 5' YRNA-derived fragment
agttggtccgagtgttgtgggttattgttaagttgatttaa

SEQ ID NO: 24922 - DNA, 41 bp, Artificial Sequence
  synthetic circulating small noncoding RNA (sncRNA) 5' YRNA-derived fragment
aaggctagtcaagtgaagcagtgggagtggagaaggaacaa

SEQ ID NO: 24923 - DNA, 36 bp, Artificial Sequence
  synthetic circulating small noncoding RNA (sncRNA) 5' YRNA-derived fragment
ggctggtctgatggtagtgggttatcagaacttatt

SEQ ID NO: 24924 - DNA, 29 bp, Artificial Sequence
  synthetic circulating small noncoding RNA (sncRNA) 5' YRNA-derived fragment
ggctggtccgatggtagcgggttatcaga

SEQ ID NO: 24925 - DNA, 22 bp, Artificial Sequence
  synthetic circulating small noncoding RNA (sncRNA) 5' YRNA-derived fragment
gccagtcaaatttagcagtggg

SEQ ID NO: 24926 - DNA, 41 bp, Artificial Sequence
  synthetic circulating small noncoding RNA (sncRNA) 5' YRNA-derived fragment
aaagttggtatacaaccccccactgctaaatttgactggct

SEQ ID NO: 24927 - DNA, 34 bp, Artificial Sequence
  synthetic circulating small noncoding RNA (sncRNA) 5' YRNA-derived fragment
taagttctgatgacccactaccatcggaccagcc

SEQ ID NO: 24928 - DNA, 28 bp, Artificial Sequence
  synthetic circulating small noncoding RNA (sncRNA) 5' YRNA-derived fragment
ccttctcactactgcacttgactagtct

SEQ ID NO: 24929 - DNA, 39 bp, Artificial Sequence
  synthetic circulating small noncoding RNA (sncRNA) 5' YRNA-derived fragment
ggctggtccaatagtagtgggttatcagaacttgttaat

SEQ ID NO: 24930 - DNA, 35 bp, Artificial Sequence
  synthetic circulating small noncoding RNA (sncRNA) 5' YRNA-derived fragment
cttctccactcccactgcttcacttgactagcctt

SEQ ID NO: 24931 - DNA, 31 bp, Artificial Sequence
  synthetic circulating small noncoding RNA (sncRNA) 5' YRNA-derived fragment
ggctgctccaaaggtagtgagttatctcaat

SEQ ID NO: 24932 - DNA, 34 bp, Artificial Sequence
  synthetic circulating small noncoding RNA (sncRNA) 5' YRNA-derived fragment
ggctggtccgatggtagcaggttatcagaactta

SEQ ID NO: 24933 - DNA, 42 bp, Artificial Sequence
  synthetic circulating small noncoding RNA (sncRNA) 5' YRNA-derived fragment
aaccagtcaaatttagcagtggggggttgtataccaacttta

SEQ ID NO: 24934 - DNA, 25 bp, Artificial Sequence
  synthetic circulating small noncoding RNA (sncRNA) 5' YRNA-derived fragment
cagccagtcaaatttagcagtgggg

SEQ ID NO: 24935 - DNA, 23 bp, Artificial Sequence
  synthetic circulating small noncoding RNA (sncRNA) 5' YRNA-derived fragment
ctagtcaagtgcagtagtgagga

SEQ ID NO: 24936 - DNA, 38 bp, Artificial Sequence
  synthetic circulating small noncoding RNA (sncRNA) 5' YRNA-derived fragment
ggcttgtctgatggtagtgggttatcagaacttattat

SEQ ID NO: 24937 - DNA, 18 bp, Artificial Sequence
  synthetic circulating small noncoding RNA (sncRNA) 5' YRNA-derived fragment
actgctaaatttgactgg

SEQ ID NO: 24938 - DNA, 37 bp, Artificial Sequence
  synthetic circulating small noncoding RNA (sncRNA) 5' YRNA-derived fragment
ggctggtctgatggtagtgggttatcagaacttatta

SEQ ID NO: 24939 - DNA, 33 bp, Artificial Sequence
  synthetic circulating small noncoding RNA (sncRNA) 5' YRNA-derived fragment
aaaaccagtcaaatttagcagtagggggttgta

SEQ ID NO: 24940 - DNA, 26 bp, Artificial Sequence
  synthetic circulating small noncoding RNA (sncRNA) 5' YRNA-derived fragment
ggtccgatggtagtgggttatcagaa

SEQ ID NO: 24941 - DNA, 33 bp, Artificial Sequence
  synthetic circulating small noncoding RNA (sncRNA) 5' YRNA-derived fragment
atgttttgataacccactaccatcagaccagcc

SEQ ID NO: 24942 - DNA, 44 bp, Artificial Sequence
  synthetic circulating small noncoding RNA (sncRNA) 5' YRNA-derived fragment
ctccttgttctactctttccccccttctcactactgcacttgac

SEQ ID NO: 24943 - DNA, 25 bp, Artificial Sequence
  synthetic circulating small noncoding RNA (sncRNA) 5' YRNA-derived fragment
gactagtcaagtgtagtagtgagaa

SEQ ID NO: 24944 - DNA, 27 bp, Artificial Sequence
  synthetic circulating small noncoding RNA (sncRNA) 5' YRNA-derived fragment
aagttctgataacccactaccatcgga

SEQ ID NO: 24945 - DNA, 32 bp, Artificial Sequence
  synthetic circulating small noncoding RNA (sncRNA) 5' YRNA-derived fragment
ggctggtctgaaggtagtgagttatctcaact

SEQ ID NO: 24946 - DNA, 43 bp, Artificial Sequence
  synthetic circulating small noncoding RNA (sncRNA) 5' YRNA-derived fragment
ctttgttccttctccactcccactgcttcacttgactagcctt

SEQ ID NO: 24947 - DNA, 26 bp, Artificial Sequence
  synthetic circulating small noncoding RNA (sncRNA) 5' YRNA-derived fragment
atcccccctgctaaatttgactggct

SEQ ID NO: 24948 - DNA, 35 bp, Artificial Sequence
  synthetic circulating small noncoding RNA (sncRNA) 5' YRNA-derived fragment
aggctagtcaagtgaagcagtgggagtggagaagg

SEQ ID NO: 24949 - DNA, 40 bp, Artificial Sequence
  synthetic circulating small noncoding RNA (sncRNA) 5' YRNA-derived fragment
tgttaataagttctgataacccactaccatccgacaagcc

SEQ ID NO: 24950 - DNA, 22 bp, Artificial Sequence
  synthetic circulating small noncoding RNA (sncRNA) 5' YRNA-derived fragment
ccgagtgttgtgggttattgtt

SEQ ID NO: 24951 - DNA, 22 bp, Artificial Sequence
  synthetic circulating small noncoding RNA (sncRNA) 5' YRNA-derived fragment
cgaaggtagtgagttatctcaa

SEQ ID NO: 24952 - DNA, 21 bp, Artificial Sequence
  synthetic circulating small noncoding RNA (sncRNA) 5' YRNA-derived fragment
cagccagtcaaatttagcagt

SEQ ID NO: 24953 - DNA, 26 bp, Artificial Sequence
  synthetic circulating small noncoding RNA (sncRNA) 5' YRNA-derived fragment
agcctagtcaagtgaagcagtgggag

SEQ ID NO: 24954 - DNA, 30 bp, Artificial Sequence
  synthetic circulating small noncoding RNA (sncRNA) 5' YRNA-derived fragment
ggctggtccgatggtagtgatttatcagaa

SEQ ID NO: 24955 - DNA, 28 bp, Artificial Sequence
  synthetic circulating small noncoding RNA (sncRNA) 5' YRNA-derived fragment
tacaaccccccactgctaaatttgactg

SEQ ID NO: 24956 - DNA, 20 bp, Artificial Sequence
  synthetic circulating small noncoding RNA (sncRNA) 5' YRNA-derived fragment
ccacaaccgcgcttgactag

SEQ ID NO: 24957 - DNA, 31 bp, Artificial Sequence
  synthetic circulating small noncoding RNA (sncRNA) 5' YRNA-derived fragment
gctggtctgatggtagtgggttatcaggact

SEQ ID NO: 24958 - DNA, 31 bp, Artificial Sequence
  synthetic circulating small noncoding RNA (sncRNA) 5' YRNA-derived fragment
ggctagtctgatggtagtgggttatcagaat

SEQ ID NO: 24959 - DNA, 24 bp, Artificial Sequence
  synthetic circulating small noncoding RNA (sncRNA) 5' YRNA-derived fragment
cccactcctaaatttgcctggctt

SEQ ID NO: 24960 - DNA, 20 bp, Artificial Sequence
  synthetic circulating small noncoding RNA (sncRNA) 5' YRNA-derived fragment
aacattagtgtcactgcagt

SEQ ID NO: 24961 - DNA, 20 bp, Artificial Sequence
  synthetic circulating small noncoding RNA (sncRNA) 5' YRNA-derived fragment
cccccacaaccgcgcttgac

SEQ ID NO: 24962 - DNA, 20 bp, Artificial Sequence
  synthetic circulating small noncoding RNA (sncRNA) 5' YRNA-derived fragment
agttctgataaccccctacc

SEQ ID NO: 24963 - DNA, 23 bp, Artificial Sequence
  synthetic circulating small noncoding RNA (sncRNA) 5' YRNA-derived fragment
agtgttgtgggttattgttaagt

SEQ ID NO: 24964 - DNA, 20 bp, Artificial Sequence
  synthetic circulating small noncoding RNA (sncRNA) 5' YRNA-derived fragment
ggtagtgggttatcaggact

SEQ ID NO: 24965 - DNA, 25 bp, Artificial Sequence
  synthetic circulating small noncoding RNA (sncRNA) 5' YRNA-derived fragment
aaggctagtcaagggaagcagtggg

SEQ ID NO: 24966 - DNA, 25 bp, Artificial Sequence
  synthetic circulating small noncoding RNA (sncRNA) 5' YRNA-derived fragment
ctcccactgctaaatttgactggct

SEQ ID NO: 24967 - DNA, 32 bp, Artificial Sequence
  synthetic circulating small noncoding RNA (sncRNA) 5' YRNA-derived fragment
ggtggtccaatggtagtgggttatcagaactt

SEQ ID NO: 24968 - DNA, 30 bp, Artificial Sequence
  synthetic circulating small noncoding RNA (sncRNA) 5' YRNA-derived fragment
cagaacttattaacattagtgtcactaaag

SEQ ID NO: 24969 - DNA, 30 bp, Artificial Sequence
  synthetic circulating small noncoding RNA (sncRNA) 5' YRNA-derived fragment
aggctagtcaagtgaagcagtgggagtgga

SEQ ID NO: 24970 - DNA, 31 bp, Artificial Sequence
  synthetic circulating small noncoding RNA (sncRNA) 5' YRNA-derived fragment
tctccattcccactgcttcacttgactagtt

SEQ ID NO: 24971 - DNA, 24 bp, Artificial Sequence
  synthetic circulating small noncoding RNA (sncRNA) 5' YRNA-derived fragment
gatagtcaagtgaagcagtgggag

SEQ ID NO: 24972 - DNA, 23 bp, Artificial Sequence
  synthetic circulating small noncoding RNA (sncRNA) 5' YRNA-derived fragment
ctagtcaagtgcaggagtgagaa

SEQ ID NO: 24973 - DNA, 32 bp, Artificial Sequence
  synthetic circulating small noncoding RNA (sncRNA) 5' YRNA-derived fragment
tcagaacttattaacattagtgtcactaaagt

SEQ ID NO: 24974 - DNA, 21 bp, Artificial Sequence
  synthetic circulating small noncoding RNA (sncRNA) 5' YRNA-derived fragment
tgttgtgggttattgttaagt

SEQ ID NO: 24975 - DNA, 25 bp, Artificial Sequence
  synthetic circulating small noncoding RNA (sncRNA) 5' YRNA-derived fragment
aacattagtgtcactaaagttggta

SEQ ID NO: 24976 - DNA, 22 bp, Artificial Sequence
  synthetic circulating small noncoding RNA (sncRNA) 5' YRNA-derived fragment
agccagtcaaatttagcagtgg

SEQ ID NO: 24977 - DNA, 31 bp, Artificial Sequence
  synthetic circulating small noncoding RNA (sncRNA) 5' YRNA-derived fragment
ccccccttctcactactgcacttgactagtc

SEQ ID NO: 24978 - DNA, 36 bp, Artificial Sequence
  synthetic circulating small noncoding RNA (sncRNA) 5' YRNA-derived fragment
ctttccccccttctcactactgcacttgactagtct

SEQ ID NO: 24979 - DNA, 28 bp, Artificial Sequence
  synthetic circulating small noncoding RNA (sncRNA) 5' YRNA-derived fragment
ttggtccgagtgttgtgggttattgtta

SEQ ID NO: 24980 - DNA, 26 bp, Artificial Sequence
  synthetic circulating small noncoding RNA (sncRNA) 5' YRNA-derived fragment
actagtcaagtgaagcagtgggagtg

SEQ ID NO: 24981 - DNA, 27 bp, Artificial Sequence
  synthetic circulating small noncoding RNA (sncRNA) 5' YRNA-derived fragment
tcccactgcttcacttgactagccttt

SEQ ID NO: 24982 - DNA, 19 bp, Artificial Sequence
  synthetic circulating small noncoding RNA (sncRNA) 5' YRNA-derived fragment
cacaaccgcgcttgactag

SEQ ID NO: 24983 - DNA, 32 bp, Artificial Sequence
  synthetic circulating small noncoding RNA (sncRNA) 5' YRNA-derived fragment
agttctgataacctactacaatggaaccagcc

SEQ ID NO: 24984 - DNA, 30 bp, Artificial Sequence
  synthetic circulating small noncoding RNA (sncRNA) 5' YRNA-derived fragment
ttgagttaactcactaccttcggaccagct

SEQ ID NO: 24985 - DNA, 40 bp, Artificial Sequence
  synthetic circulating small noncoding RNA (sncRNA) 5' YRNA-derived fragment
gaacaatcaattgagataactcactaccttcggaccagcc

SEQ ID NO: 24986 - DNA, 27 bp, Artificial Sequence
  synthetic circulating small noncoding RNA (sncRNA) 5' YRNA-derived fragment
tttctgataacccactaccatcggacc

SEQ ID NO: 24987 - DNA, 30 bp, Artificial Sequence
  synthetic circulating small noncoding RNA (sncRNA) 5' YRNA-derived fragment
ttctgataacccactaccatcgaaccagcc

SEQ ID NO: 24988 - DNA, 37 bp, Artificial Sequence
  synthetic circulating small noncoding RNA (sncRNA) 5' YRNA-derived fragment
taataaattctgataacccactaccatcagaccagcc

SEQ ID NO: 24989 - DNA, 36 bp, Artificial Sequence
  synthetic circulating small noncoding RNA (sncRNA) 5' YRNA-derived fragment
ggtccgatggtagtgggttatcagaacttattaaca

SEQ ID NO: 24990 - DNA, 39 bp, Artificial Sequence
  synthetic circulating small noncoding RNA (sncRNA) 5' YRNA-derived fragment
gatcaattagttgtaaacaccactgcactcggaccagcc

SEQ ID NO: 24991 - DNA, 31 bp, Artificial Sequence
  synthetic circulating small noncoding RNA (sncRNA) 5' YRNA-derived fragment
attgagataactcactatcttcggaccaacc

SEQ ID NO: 24992 - DNA, 30 bp, Artificial Sequence
  synthetic circulating small noncoding RNA (sncRNA) 5' YRNA-derived fragment
ggctggtccaaaggtagtgagttatctcag

SEQ ID NO: 24993 - DNA, 30 bp, Artificial Sequence
  synthetic circulating small noncoding RNA (sncRNA) 5' YRNA-derived fragment
ttgagataactcactatcttcggaccaacc

SEQ ID NO: 24994 - DNA, 30 bp, Artificial Sequence
  synthetic circulating small noncoding RNA (sncRNA) 5' YRNA-derived fragment
ctggtcctatggtagtgggttatcagaact

SEQ ID NO: 24995 - DNA, 30 bp, Artificial Sequence
  synthetic circulating small noncoding RNA (sncRNA) 5' YRNA-derived fragment
gctggtccgagtgcagtggtgtttacaact

SEQ ID NO: 24996 - DNA, 20 bp, Artificial Sequence
  synthetic circulating small noncoding RNA (sncRNA) 5' YRNA-derived fragment
ggctggtccgatggtagtgg

SEQ ID NO: 24997 - DNA, 44 bp, Artificial Sequence
  synthetic circulating small noncoding RNA (sncRNA) 5' YRNA-derived fragment
agttggtccgagtgttgtgggttattgttaagttgatttaacat

SEQ ID NO: 24998 - DNA, 34 bp, Artificial Sequence
  synthetic circulating small noncoding RNA (sncRNA) 5' YRNA-derived fragment
gactagtcaagtgaagcagtgggagtggagaagg

SEQ ID NO: 24999 - DNA, 40 bp, Artificial Sequence
  synthetic circulating small noncoding RNA (sncRNA) 5' YRNA-derived fragment
cagccagtcaaatttagcagtggggggttgtataccaact

SEQ ID NO: 25000 - DNA, 26 bp, Artificial Sequence
  synthetic circulating small noncoding RNA (sncRNA) 5' YRNA-derived fragment
gataacccactaccattggaccaggc

SEQ ID NO: 25001 - DNA, 32 bp, Artificial Sequence
  synthetic circulating small noncoding RNA (sncRNA) 5' YRNA-derived fragment
tccactcccactgcttcacttgactagccttt

SEQ ID NO: 25002 - DNA, 27 bp, Artificial Sequence
  synthetic circulating small noncoding RNA (sncRNA) 5' YRNA-derived fragment
ggctggtccgagtgcagtggtgtttac

SEQ ID NO: 25003 - DNA, 21 bp, Artificial Sequence
  synthetic circulating small noncoding RNA (sncRNA) 5' YRNA-derived fragment
ttagtgtcactaaagttggta

SEQ ID NO: 25004 - DNA, 36 bp, Artificial Sequence
  synthetic circulating small noncoding RNA (sncRNA) 5' YRNA-derived fragment
ggctggtacaatggtagtgggttatcagaacttatt

SEQ ID NO: 25005 - DNA, 23 bp, Artificial Sequence
  synthetic circulating small noncoding RNA (sncRNA) 5' YRNA-derived fragment
gacccactaccatcggaccagcc

SEQ ID NO: 25006 - DNA, 20 bp, Artificial Sequence
  synthetic circulating small noncoding RNA (sncRNA) 5' YRNA-derived fragment
cagtcagttacagatcgaac

SEQ ID NO: 25007 - DNA, 24 bp, Artificial Sequence
  synthetic circulating small noncoding RNA (sncRNA) 5' YRNA-derived fragment
accagtcaaatttagcagtggggg

SEQ ID NO: 25008 - DNA, 27 bp, Artificial Sequence
  synthetic circulating small noncoding RNA (sncRNA) 5' YRNA-derived fragment
cccccattgctaaatttgactggcttt

SEQ ID NO: 25009 - DNA, 30 bp, Artificial Sequence
  synthetic circulating small noncoding RNA (sncRNA) 5' YRNA-derived fragment
ggctggtccgatggtagtgggttaccagaa

SEQ ID NO: 25010 - DNA, 37 bp, Artificial Sequence
  synthetic circulating small noncoding RNA (sncRNA) 5' YRNA-derived fragment
tgttaatttctgataacccactaccatcggaccagcc

SEQ ID NO: 25011 - DNA, 28 bp, Artificial Sequence
  synthetic circulating small noncoding RNA (sncRNA) 5' YRNA-derived fragment
gttctgataacccactaccatccgacaa

SEQ ID NO: 25012 - DNA, 31 bp, Artificial Sequence
  synthetic circulating small noncoding RNA (sncRNA) 5' YRNA-derived fragment
agttctgataacccactaccattggaccaac

SEQ ID NO: 25013 - DNA, 31 bp, Artificial Sequence
  synthetic circulating small noncoding RNA (sncRNA) 5' YRNA-derived fragment
gttgagataactcactaccttcagaccagcc

SEQ ID NO: 25014 - DNA, 30 bp, Artificial Sequence
  synthetic circulating small noncoding RNA (sncRNA) 5' YRNA-derived fragment
gttctgataacctactaccatcggaccagc

SEQ ID NO: 25015 - DNA, 28 bp, Artificial Sequence
  synthetic circulating small noncoding RNA (sncRNA) 5' YRNA-derived fragment
aataagttctgataacccactaccatcg

SEQ ID NO: 25016 - DNA, 40 bp, Artificial Sequence
  synthetic circulating small noncoding RNA (sncRNA) 5' YRNA-derived fragment
ggctggtctgatggtagtgggttatcagaacttattaaca

SEQ ID NO: 25017 - DNA, 27 bp, Artificial Sequence
  synthetic circulating small noncoding RNA (sncRNA) 5' YRNA-derived fragment
cccgccactgctatatttgactggttt

SEQ ID NO: 25018 - DNA, 20 bp, Artificial Sequence
  synthetic circulating small noncoding RNA (sncRNA) 5' YRNA-derived fragment
gtcaagtgaagcagtgggag

SEQ ID NO: 25019 - DNA, 29 bp, Artificial Sequence
  synthetic circulating small noncoding RNA (sncRNA) 5' YRNA-derived fragment
tttaagccagtcaaatttagcagtggggg

SEQ ID NO: 25020 - DNA, 28 bp, Artificial Sequence
  synthetic circulating small noncoding RNA (sncRNA) 5' YRNA-derived fragment
aaaccagtcaaatttagcagtggggggt

SEQ ID NO: 25021 - DNA, 33 bp, Artificial Sequence
  synthetic circulating small noncoding RNA (sncRNA) 5' YRNA-derived fragment
aaaccagtcaaatttagcagtggggggttgtat

SEQ ID NO: 25022 - DNA, 28 bp, Artificial Sequence
  synthetic circulating small noncoding RNA (sncRNA) 5' YRNA-derived fragment
acaataacccacaacactcagaccaaca

SEQ ID NO: 25023 - DNA, 26 bp, Artificial Sequence
  synthetic circulating small noncoding RNA (sncRNA) 5' YRNA-derived fragment
ctcccactgcttcacttgactagact

SEQ ID NO: 25024 - DNA, 23 bp, Artificial Sequence
  synthetic circulating small noncoding RNA (sncRNA) 5' YRNA-derived fragment
cccactgcttcacttgactagcc

SEQ ID NO: 25025 - DNA, 25 bp, Artificial Sequence
  synthetic circulating small noncoding RNA (sncRNA) 5' YRNA-derived fragment
gcccactgcttcacttgactagcct

SEQ ID NO: 25026 - DNA, 31 bp, Artificial Sequence
  synthetic circulating small noncoding RNA (sncRNA) 5' YRNA-derived fragment
ggctagtcaagtgaagcagtgggagtggaga

SEQ ID NO: 25027 - DNA, 32 bp, Artificial Sequence
  synthetic circulating small noncoding RNA (sncRNA) 5' YRNA-derived fragment
agttctgataatccactaccactggaccagcc

SEQ ID NO: 25028 - DNA, 37 bp, Artificial Sequence
  synthetic circulating small noncoding RNA (sncRNA) 5' YRNA-derived fragment
tccttctccactcccactgcttcacttgactagcctt

SEQ ID NO: 25029 - DNA, 26 bp, Artificial Sequence
  synthetic circulating small noncoding RNA (sncRNA) 5' YRNA-derived fragment
agccagtcacatttagcagtgtgggg

SEQ ID NO: 25030 - DNA, 32 bp, Artificial Sequence
  synthetic circulating small noncoding RNA (sncRNA) 5' YRNA-derived fragment
agttctcataacctactaccatcagaccagac

SEQ ID NO: 25031 - DNA, 22 bp, Artificial Sequence
  synthetic circulating small noncoding RNA (sncRNA) 5' YRNA-derived fragment
tcccgctgcttcacttgactag

SEQ ID NO: 25032 - DNA, 37 bp, Artificial Sequence
  synthetic circulating small noncoding RNA (sncRNA) 5' YRNA-derived fragment
ggctggtccgatggtagcaggttatcagaacttatta

SEQ ID NO: 25033 - DNA, 19 bp, Artificial Sequence
  synthetic circulating small noncoding RNA (sncRNA) 5' YRNA-derived fragment
taattgatcacaaccagtt

SEQ ID NO: 25034 - DNA, 30 bp, Artificial Sequence
  synthetic circulating small noncoding RNA (sncRNA) 5' YRNA-derived fragment
gactggtctgaaggtagtgagttgtctcaa

SEQ ID NO: 25035 - DNA, 30 bp, Artificial Sequence
  synthetic circulating small noncoding RNA (sncRNA) 5' YRNA-derived fragment
gccagtcaaatttagcagtggggggttgta

SEQ ID NO: 25036 - DNA, 26 bp, Artificial Sequence
  synthetic circulating small noncoding RNA (sncRNA) 5' YRNA-derived fragment
aagccagtcaaatttagcagtggagg

SEQ ID NO: 25037 - DNA, 30 bp, Artificial Sequence
  synthetic circulating small noncoding RNA (sncRNA) 5' YRNA-derived fragment
aaaaaaccagtcaaatttagcagtaggggg

SEQ ID NO: 25038 - DNA, 18 bp, Artificial Sequence
  synthetic circulating small noncoding RNA (sncRNA) 5' YRNA-derived fragment
gactggtccgaaggtagt

SEQ ID NO: 25039 - DNA, 31 bp, Artificial Sequence
  synthetic circulating small noncoding RNA (sncRNA) 5' YRNA-derived fragment
ggctggtccaaaggtagtgagttatctcagt

SEQ ID NO: 25040 - DNA, 39 bp, Artificial Sequence
  synthetic circulating small noncoding RNA (sncRNA) 5' YRNA-derived fragment
tttaacattgtctccccccacaaccgcgcttgactagct

SEQ ID NO: 25041 - DNA, 19 bp, Artificial Sequence
  synthetic circulating small noncoding RNA (sncRNA) 5' YRNA-derived fragment
gtagtgggttatcagaatt

SEQ ID NO: 25042 - DNA, 30 bp, Artificial Sequence
  synthetic circulating small noncoding RNA (sncRNA) 5' YRNA-derived fragment
gttctgataacccactactatcggaccagc

SEQ ID NO: 25043 - DNA, 19 bp, Artificial Sequence
  synthetic circulating small noncoding RNA (sncRNA) 5' YRNA-derived fragment
ccccccactgctaaatttt

SEQ ID NO: 25044 - DNA, 30 bp, Artificial Sequence
  synthetic circulating small noncoding RNA (sncRNA) 5' YRNA-derived fragment
ttggtccgagtgttgtgggttattgttaag

SEQ ID NO: 25045 - DNA, 23 bp, Artificial Sequence
  synthetic circulating small noncoding RNA (sncRNA) 5' YRNA-derived fragment
gctagtcaagtgaagcagtggga

SEQ ID NO: 25046 - DNA, 26 bp, Artificial Sequence
  synthetic circulating small noncoding RNA (sncRNA) 5' YRNA-derived fragment
tgataacccactaccatcggaccagc

SEQ ID NO: 25047 - DNA, 26 bp, Artificial Sequence
  synthetic circulating small noncoding RNA (sncRNA) 5' YRNA-derived fragment
ggctggtctgaaggtagtgggttatc

SEQ ID NO: 25048 - DNA, 18 bp, Artificial Sequence
  synthetic circulating small noncoding RNA (sncRNA) 5' YRNA-derived fragment
acaataacccacaacact

SEQ ID NO: 25049 - DNA, 29 bp, Artificial Sequence
  synthetic circulating small noncoding RNA (sncRNA) 5' YRNA-derived fragment
gctggtctgaaggtagtgagttagctcaa

SEQ ID NO: 25050 - DNA, 18 bp, Artificial Sequence
  synthetic circulating small noncoding RNA (sncRNA) 5' YRNA-derived fragment
tagtgggttatcagaatt

SEQ ID NO: 25051 - DNA, 32 bp, Artificial Sequence
  synthetic circulating small noncoding RNA (sncRNA) 5' YRNA-derived fragment
gggctggtcagaaggtagtgagttatctcaat

SEQ ID NO: 25052 - DNA, 32 bp, Artificial Sequence
  synthetic circulating small noncoding RNA (sncRNA) 5' YRNA-derived fragment
ggctggtccaaaggtagtgagttatctcaatt

SEQ ID NO: 25053 - DNA, 26 bp, Artificial Sequence
  synthetic circulating small noncoding RNA (sncRNA) 5' YRNA-derived fragment
aggcagtcaaatttagcagtgtgggg

SEQ ID NO: 25054 - DNA, 32 bp, Artificial Sequence
  synthetic circulating small noncoding RNA (sncRNA) 5' YRNA-derived fragment
gattgagataactcactacctttggaccagcc

SEQ ID NO: 25055 - DNA, 28 bp, Artificial Sequence
  synthetic circulating small noncoding RNA (sncRNA) 5' YRNA-derived fragment
ctgataacccactaccatcgaaccagcc

SEQ ID NO: 25056 - DNA, 31 bp, Artificial Sequence
  synthetic circulating small noncoding RNA (sncRNA) 5' YRNA-derived fragment
ggctggtctgaaggtagtgagttacctcaat

SEQ ID NO: 25057 - DNA, 31 bp, Artificial Sequence
  synthetic circulating small noncoding RNA (sncRNA) 5' YRNA-derived fragment
tatacaaccccccactgctaaatttgactgg

SEQ ID NO: 25058 - DNA, 19 bp, Artificial Sequence
  synthetic circulating small noncoding RNA (sncRNA) 5' YRNA-derived fragment
atttctgataacccactac

SEQ ID NO: 25059 - DNA, 32 bp, Artificial Sequence
  synthetic circulating small noncoding RNA (sncRNA) 5' YRNA-derived fragment
gggctggtccgatggtagcgggttatcagaac

SEQ ID NO: 25060 - DNA, 22 bp, Artificial Sequence
  synthetic circulating small noncoding RNA (sncRNA) 5' YRNA-derived fragment
cccactgcttcacttgactagc

SEQ ID NO: 25061 - DNA, 28 bp, Artificial Sequence
  synthetic circulating small noncoding RNA (sncRNA) 5' YRNA-derived fragment
agttctgataacccactactatcggacc

SEQ ID NO: 25062 - DNA, 28 bp, Artificial Sequence
  synthetic circulating small noncoding RNA (sncRNA) 5' YRNA-derived fragment
ggctggtccgatggtagtgatttatcag

SEQ ID NO: 25063 - DNA, 20 bp, Artificial Sequence
  synthetic circulating small noncoding RNA (sncRNA) 5' YRNA-derived fragment
ccccccactgctaaatttga

SEQ ID NO: 25064 - DNA, 30 bp, Artificial Sequence
  synthetic circulating small noncoding RNA (sncRNA) 5' YRNA-derived fragment
cagccagtcaaatttagcagtggggggttg

SEQ ID NO: 25065 - DNA, 30 bp, Artificial Sequence
  synthetic circulating small noncoding RNA (sncRNA) 5' YRNA-derived fragment
ctctgacaacccactaccatcggaccagcc

SEQ ID NO: 25066 - DNA, 28 bp, Artificial Sequence
  synthetic circulating small noncoding RNA (sncRNA) 5' YRNA-derived fragment
ggtccaatggtagtggtttatcagaact

SEQ ID NO: 25067 - DNA, 44 bp, Artificial Sequence
  synthetic circulating small noncoding RNA (sncRNA) 5' YRNA-derived fragment
tctttgttccttctccactcccactgcttcacttgactagccta

SEQ ID NO: 25068 - DNA, 19 bp, Artificial Sequence
  synthetic circulating small noncoding RNA (sncRNA) 5' YRNA-derived fragment
gtagtggtttatcagaact

SEQ ID NO: 25069 - DNA, 46 bp, Artificial Sequence
  synthetic circulating small noncoding RNA (sncRNA) 5' YRNA-derived fragment
cagatttctttgttccttctccactcccactgcttcacttgactag

SEQ ID NO: 25070 - DNA, 33 bp, Artificial Sequence
  synthetic circulating small noncoding RNA (sncRNA) 5' YRNA-derived fragment
cagccagtcaaatttagcagtggggggttgtat

SEQ ID NO: 25071 - DNA, 18 bp, Artificial Sequence
  synthetic circulating small noncoding RNA (sncRNA) 5' YRNA-derived fragment
aaatttagcagtgggggg

SEQ ID NO: 25072 - DNA, 39 bp, Artificial Sequence
  synthetic circulating small noncoding RNA (sncRNA) 5' YRNA-derived fragment
ggctggtacaatggtagtgggttatcagaacttattaac

SEQ ID NO: 25073 - DNA, 41 bp, Artificial Sequence
  synthetic circulating small noncoding RNA (sncRNA) 5' YRNA-derived fragment
agactagtcaagtgtagtagtgagaaggtgggaaagagtag

SEQ ID NO: 25074 - DNA, 32 bp, Artificial Sequence
  synthetic circulating small noncoding RNA (sncRNA) 5' YRNA-derived fragment
gggctggtccaaaggtagtgagttatctcaat

SEQ ID NO: 25075 - DNA, 20 bp, Artificial Sequence
  synthetic circulating small noncoding RNA (sncRNA) 5' YRNA-derived fragment
cagctaaatttgactggctt

SEQ ID NO: 25076 - DNA, 30 bp, Artificial Sequence
  synthetic circulating small noncoding RNA (sncRNA) 5' YRNA-derived fragment
ttgtctgatggtagtgggttatcagaactt

SEQ ID NO: 25077 - DNA, 46 bp, Artificial Sequence
  synthetic circulating small noncoding RNA (sncRNA) 5' YRNA-derived fragment
atttctttgttccttctccactcccactgcttcacttgactagcct

SEQ ID NO: 25078 - DNA, 39 bp, Artificial Sequence
  synthetic circulating small noncoding RNA (sncRNA) 5' YRNA-derived fragment
gttaataagttctgataacctactaccatcggaccagcc

SEQ ID NO: 25079 - DNA, 27 bp, Artificial Sequence
  synthetic circulating small noncoding RNA (sncRNA) 5' YRNA-derived fragment
ggtcagatggtagtgggttatcagaac

SEQ ID NO: 25080 - DNA, 31 bp, Artificial Sequence
  synthetic circulating small noncoding RNA (sncRNA) 5' YRNA-derived fragment
gtatacaaccccccactgctaaatttgactg

SEQ ID NO: 25081 - DNA, 37 bp, Artificial Sequence
  synthetic circulating small noncoding RNA (sncRNA) 5' YRNA-derived fragment
ggctggtacaatggtagtgggttatcagaacttatta

SEQ ID NO: 25082 - DNA, 29 bp, Artificial Sequence
  synthetic circulating small noncoding RNA (sncRNA) 5' YRNA-derived fragment
tgtctgatggtagtgggttatcagaactt

SEQ ID NO: 25083 - DNA, 27 bp, Artificial Sequence
  synthetic circulating small noncoding RNA (sncRNA) 5' YRNA-derived fragment
gttctgataacccactaccatccgaca

SEQ ID NO: 25084 - DNA, 28 bp, Artificial Sequence
  synthetic circulating small noncoding RNA (sncRNA) 5' YRNA-derived fragment
aaaggctagtcaagtgaagcagtgggag

SEQ ID NO: 25085 - DNA, 18 bp, Artificial Sequence
  synthetic circulating small noncoding RNA (sncRNA) 5' YRNA-derived fragment
gccagtcaaatttagcag

SEQ ID NO: 25086 - DNA, 36 bp, Artificial Sequence
  synthetic circulating small noncoding RNA (sncRNA) 5' YRNA-derived fragment
tgttccttctccactcccactgcttcacttgactag

SEQ ID NO: 25087 - DNA, 23 bp, Artificial Sequence
  synthetic circulating small noncoding RNA (sncRNA) 5' YRNA-derived fragment
cagtcaaatttagcagtgggggt

SEQ ID NO: 25088 - DNA, 23 bp, Artificial Sequence
  synthetic circulating small noncoding RNA (sncRNA) 5' YRNA-derived fragment
actcccactgcttcacttgacta

SEQ ID NO: 25089 - DNA, 26 bp, Artificial Sequence
  synthetic circulating small noncoding RNA (sncRNA) 5' YRNA-derived fragment
cttctcactactacacttgactagtc

SEQ ID NO: 25090 - DNA, 23 bp, Artificial Sequence
  synthetic circulating small noncoding RNA (sncRNA) 5' YRNA-derived fragment
cagtcaaatttagcagtggaggg

SEQ ID NO: 25091 - DNA, 27 bp, Artificial Sequence
  synthetic circulating small noncoding RNA (sncRNA) 5' YRNA-derived fragment
ccccactgctaaatttgactggctttt

SEQ ID NO: 25092 - DNA, 30 bp, Artificial Sequence
  synthetic circulating small noncoding RNA (sncRNA) 5' YRNA-derived fragment
ttgagctaactcactacctttggacatgcc

SEQ ID NO: 25093 - DNA, 27 bp, Artificial Sequence
  synthetic circulating small noncoding RNA (sncRNA) 5' YRNA-derived fragment
tgacaacccactaccatcggaccagcc

SEQ ID NO: 25094 - DNA, 33 bp, Artificial Sequence
  synthetic circulating small noncoding RNA (sncRNA) 5' YRNA-derived fragment
caattgagataactcactacctttggaccagac

SEQ ID NO: 25095 - DNA, 33 bp, Artificial Sequence
  synthetic circulating small noncoding RNA (sncRNA) 5' YRNA-derived fragment
ggctggtctgatggtagtgggttatcagaattt

SEQ ID NO: 25096 - DNA, 24 bp, Artificial Sequence
  synthetic circulating small noncoding RNA (sncRNA) 5' YRNA-derived fragment
tattaacattagtgtcactaaagt

SEQ ID NO: 25097 - DNA, 28 bp, Artificial Sequence
  synthetic circulating small noncoding RNA (sncRNA) 5' YRNA-derived fragment
gatataactcactaccttcggaccagcc

SEQ ID NO: 25098 - DNA, 32 bp, Artificial Sequence
  synthetic circulating small noncoding RNA (sncRNA) 5' YRNA-derived fragment
ggctggtcagaaggtagtgagttatctcaatt

SEQ ID NO: 25099 - DNA, 35 bp, Artificial Sequence
  synthetic circulating small noncoding RNA (sncRNA) 5' YRNA-derived fragment
ttctccactcccactgcttcacttgactagccttt

SEQ ID NO: 25100 - DNA, 28 bp, Artificial Sequence
  synthetic circulating small noncoding RNA (sncRNA) 5' YRNA-derived fragment
ccactcccactgcttcacttgactagcc

SEQ ID NO: 25101 - DNA, 41 bp, Artificial Sequence
  synthetic circulating small noncoding RNA (sncRNA) 5' YRNA-derived fragment
tttgttccttctccactcccactgcttcacttgactagcct

SEQ ID NO: 25102 - DNA, 24 bp, Artificial Sequence
  synthetic circulating small noncoding RNA (sncRNA) 5' YRNA-derived fragment
ggtagtgggttatcagaacttatt

SEQ ID NO: 25103 - DNA, 28 bp, Artificial Sequence
  synthetic circulating small noncoding RNA (sncRNA) 5' YRNA-derived fragment
tagactagtcaagtgtagtagtgagaag

SEQ ID NO: 25104 - DNA, 26 bp, Artificial Sequence
  synthetic circulating small noncoding RNA (sncRNA) 5' YRNA-derived fragment
tcccccactgctaaatttgactggct

SEQ ID NO: 25105 - DNA, 24 bp, Artificial Sequence
  synthetic circulating small noncoding RNA (sncRNA) 5' YRNA-derived fragment
gctagtcaagtgaagcagtgggag

SEQ ID NO: 25106 - DNA, 31 bp, Artificial Sequence
  synthetic circulating small noncoding RNA (sncRNA) 5' YRNA-derived fragment
agatggtccgaaggtagtgagttatctcaat

SEQ ID NO: 25107 - DNA, 33 bp, Artificial Sequence
  synthetic circulating small noncoding RNA (sncRNA) 5' YRNA-derived fragment
caattgagataacccactaccttcggacgagcc

SEQ ID NO: 25108 - DNA, 29 bp, Artificial Sequence
  synthetic circulating small noncoding RNA (sncRNA) 5' YRNA-derived fragment
tttccgatggtagtgggttatctgaactt

SEQ ID NO: 25109 - DNA, 26 bp, Artificial Sequence
  synthetic circulating small noncoding RNA (sncRNA) 5' YRNA-derived fragment
gtcctatggtagtgggttatcagaac

SEQ ID NO: 25110 - DNA, 26 bp, Artificial Sequence
  synthetic circulating small noncoding RNA (sncRNA) 5' YRNA-derived fragment
agactagtcaagtgaagcagtgggag

SEQ ID NO: 25111 - DNA, 29 bp, Artificial Sequence
  synthetic circulating small noncoding RNA (sncRNA) 5' YRNA-derived fragment
tctgataacccactaccatccgacaagcc

SEQ ID NO: 25112 - DNA, 26 bp, Artificial Sequence
  synthetic circulating small noncoding RNA (sncRNA) 5' YRNA-derived fragment
gactagtcaagtgtagtagtgagaag

SEQ ID NO: 25113 - DNA, 25 bp, Artificial Sequence
  synthetic circulating small noncoding RNA (sncRNA) 5' YRNA-derived fragment
cccactgcttcacttgactagccta

SEQ ID NO: 25114 - DNA, 45 bp, Artificial Sequence
  synthetic circulating small noncoding RNA (sncRNA) 5' YRNA-derived fragment
taaagttggtatacaaccccccactgctaaatttgactggctttt

SEQ ID NO: 25115 - DNA, 23 bp, Artificial Sequence
  synthetic circulating small noncoding RNA (sncRNA) 5' YRNA-derived fragment
cttctcactactgcacttgacta

SEQ ID NO: 25116 - DNA, 40 bp, Artificial Sequence
  synthetic circulating small noncoding RNA (sncRNA) 5' YRNA-derived fragment
actagtcaagtgaagcagtgggagtggagaaggaacaaag

SEQ ID NO: 25117 - DNA, 27 bp, Artificial Sequence
  synthetic circulating small noncoding RNA (sncRNA) 5' YRNA-derived fragment
aaccccccactgctaaatttgactggc

SEQ ID NO: 25118 - DNA, 18 bp, Artificial Sequence
  synthetic circulating small noncoding RNA (sncRNA) 5' YRNA-derived fragment
tagtgggttatcagaaat

SEQ ID NO: 25119 - DNA, 29 bp, Artificial Sequence
  synthetic circulating small noncoding RNA (sncRNA) 5' YRNA-derived fragment
gctggtccgagtgcagtggtgtttacaac

SEQ ID NO: 25120 - DNA, 39 bp, Artificial Sequence
  synthetic circulating small noncoding RNA (sncRNA) 5' YRNA-derived fragment
ggctggtctgatggtagtgggttatcagaacttattaac

SEQ ID NO: 25121 - DNA, 18 bp, Artificial Sequence
  synthetic circulating small noncoding RNA (sncRNA) 5' YRNA-derived fragment
ccagtcaaatttagcagt

SEQ ID NO: 25122 - DNA, 41 bp, Artificial Sequence
  synthetic circulating small noncoding RNA (sncRNA) 5' YRNA-derived fragment
ttggtcccttctccactcccactgcttcacttgactagcct

SEQ ID NO: 25123 - DNA, 44 bp, Artificial Sequence
  synthetic circulating small noncoding RNA (sncRNA) 5' YRNA-derived fragment
tcactaaagttggtatacaaccccccactgctaaatttgactgg

SEQ ID NO: 25124 - DNA, 25 bp, Artificial Sequence
  synthetic circulating small noncoding RNA (sncRNA) 5' YRNA-derived fragment
ttggtccgagtgttgtgggttattg

SEQ ID NO: 25125 - DNA, 42 bp, Artificial Sequence
  synthetic circulating small noncoding RNA (sncRNA) 5' YRNA-derived fragment
ctactctttccccccttctcactactgcacttgactagtctt

SEQ ID NO: 25126 - DNA, 37 bp, Artificial Sequence
  synthetic circulating small noncoding RNA (sncRNA) 5' YRNA-derived fragment
ttggtatacaaccccccactgctaaatttgactggct

SEQ ID NO: 25127 - DNA, 46 bp, Artificial Sequence
  synthetic circulating small noncoding RNA (sncRNA) 5' YRNA-derived fragment
tcactaaagttggtatacaaccccccactgctaaatttgactggct

SEQ ID NO: 25128 - DNA, 31 bp, Artificial Sequence
  synthetic circulating small noncoding RNA (sncRNA) 5' YRNA-derived fragment
attgagttaactcactaccttcggaccagct

SEQ ID NO: 25129 - DNA, 29 bp, Artificial Sequence
  synthetic circulating small noncoding RNA (sncRNA) 5' YRNA-derived fragment
ggtcagatggtagtgggttatcagaactt

SEQ ID NO: 25130 - DNA, 38 bp, Artificial Sequence
  synthetic circulating small noncoding RNA (sncRNA) 5' YRNA-derived fragment
ggctggtccgatggtagtgggttatcagaacttactaa

SEQ ID NO: 25131 - DNA, 42 bp, Artificial Sequence
  synthetic circulating small noncoding RNA (sncRNA) 5' YRNA-derived fragment
aatattaataagttctgataacccactaccatcagaccagcc

SEQ ID NO: 25132 - DNA, 18 bp, Artificial Sequence
  synthetic circulating small noncoding RNA (sncRNA) 5' YRNA-derived fragment
aattctgataacccacta

SEQ ID NO: 25133 - DNA, 28 bp, Artificial Sequence
  synthetic circulating small noncoding RNA (sncRNA) 5' YRNA-derived fragment
gatggtagtgggttatcagaacttatta

SEQ ID NO: 25134 - DNA, 24 bp, Artificial Sequence
  synthetic circulating small noncoding RNA (sncRNA) 5' YRNA-derived fragment
ttcagtcaaatttagcagtggggg

SEQ ID NO: 25135 - DNA, 36 bp, Artificial Sequence
  synthetic circulating small noncoding RNA (sncRNA) 5' YRNA-derived fragment
ggcttttccgatggtagtgggttatctgaacttatt

SEQ ID NO: 25136 - DNA, 37 bp, Artificial Sequence
  synthetic circulating small noncoding RNA (sncRNA) 5' YRNA-derived fragment
ggctggtctgatggtagtgggttatcagaatttatta

SEQ ID NO: 25137 - DNA, 27 bp, Artificial Sequence
  synthetic circulating small noncoding RNA (sncRNA) 5' YRNA-derived fragment
aagccagtcaaatttagcagcaggtgg

SEQ ID NO: 25138 - DNA, 28 bp, Artificial Sequence
  synthetic circulating small noncoding RNA (sncRNA) 5' YRNA-derived fragment
ggtcctgtggtagtgggttatcagaact

SEQ ID NO: 25139 - DNA, 47 bp, Artificial Sequence
  synthetic circulating small noncoding RNA (sncRNA) 5' YRNA-derived fragment
tttctttgttccttctccactcccactgcttcacttgactagccttt

SEQ ID NO: 25140 - DNA, 26 bp, Artificial Sequence
  synthetic circulating small noncoding RNA (sncRNA) 5' YRNA-derived fragment
gtctcactactgcacttgactagtct

SEQ ID NO: 25141 - DNA, 30 bp, Artificial Sequence
  synthetic circulating small noncoding RNA (sncRNA) 5' YRNA-derived fragment
ggctggtccaaaggcagtgagttatctcaa

SEQ ID NO: 25142 - DNA, 25 bp, Artificial Sequence
  synthetic circulating small noncoding RNA (sncRNA) 5' YRNA-derived fragment
cttctcactactgcacttgactaga

SEQ ID NO: 25143 - DNA, 26 bp, Artificial Sequence
  synthetic circulating small noncoding RNA (sncRNA) 5' YRNA-derived fragment
gataacctactaccatcggaccagcc

SEQ ID NO: 25144 - DNA, 31 bp, Artificial Sequence
  synthetic circulating small noncoding RNA (sncRNA) 5' YRNA-derived fragment
actgagataactcactaccttcagaccagcc

SEQ ID NO: 25145 - DNA, 32 bp, Artificial Sequence
  synthetic circulating small noncoding RNA (sncRNA) 5' YRNA-derived fragment
ctggtccgatggtagtgggttatcagaactta

SEQ ID NO: 25146 - DNA, 29 bp, Artificial Sequence
  synthetic circulating small noncoding RNA (sncRNA) 5' YRNA-derived fragment
ccagtcaaatttagcagtggggggttgta

SEQ ID NO: 25147 - DNA, 27 bp, Artificial Sequence
  synthetic circulating small noncoding RNA (sncRNA) 5' YRNA-derived fragment
gttttgataacccactaccatcagacc

SEQ ID NO: 25148 - DNA, 21 bp, Artificial Sequence
  synthetic circulating small noncoding RNA (sncRNA) 5' YRNA-derived fragment
ccgagtgttgtgggttattgt

SEQ ID NO: 25149 - DNA, 28 bp, Artificial Sequence
  synthetic circulating small noncoding RNA (sncRNA) 5' YRNA-derived fragment
taagactagtcaagtgtagtagtgagaa

SEQ ID NO: 25150 - DNA, 42 bp, Artificial Sequence
  synthetic circulating small noncoding RNA (sncRNA) 5' YRNA-derived fragment
agccagtcaaatttagcagtggggggttgtataccaacttta

SEQ ID NO: 25151 - DNA, 24 bp, Artificial Sequence
  synthetic circulating small noncoding RNA (sncRNA) 5' YRNA-derived fragment
gagtgttgtgggttattgttaagc

SEQ ID NO: 25152 - DNA, 31 bp, Artificial Sequence
  synthetic circulating small noncoding RNA (sncRNA) 5' YRNA-derived fragment
gctggtccgatggtagcgggttatcagaacc

SEQ ID NO: 25153 - DNA, 28 bp, Artificial Sequence
  synthetic circulating small noncoding RNA (sncRNA) 5' YRNA-derived fragment
ggtccgatggtagtgatttatcagaact

SEQ ID NO: 25154 - DNA, 21 bp, Artificial Sequence
  synthetic circulating small noncoding RNA (sncRNA) 5' YRNA-derived fragment
ccactgctaaatttgactggc

SEQ ID NO: 25155 - DNA, 39 bp, Artificial Sequence
  synthetic circulating small noncoding RNA (sncRNA) 5' YRNA-derived fragment
gactagtcaagtgaagcagtgggagtggagaaggaacaa

SEQ ID NO: 25156 - DNA, 40 bp, Artificial Sequence
  synthetic circulating small noncoding RNA (sncRNA) 5' YRNA-derived fragment
tgttaataagttctgatgacccactaccatcggaccagcc

SEQ ID NO: 25157 - DNA, 30 bp, Artificial Sequence
  synthetic circulating small noncoding RNA (sncRNA) 5' YRNA-derived fragment
ttctccactcccactgcttcacttgactag

SEQ ID NO: 25158 - DNA, 30 bp, Artificial Sequence
  synthetic circulating small noncoding RNA (sncRNA) 5' YRNA-derived fragment
ggctggtcagatggtagtgggttatcagaa

SEQ ID NO: 25159 - DNA, 46 bp, Artificial Sequence
  synthetic circulating small noncoding RNA (sncRNA) 5' YRNA-derived fragment
actagtcaagtgcagtagtgagaaggggggaaagagtagaacaagg

SEQ ID NO: 25160 - DNA, 32 bp, Artificial Sequence
  synthetic circulating small noncoding RNA (sncRNA) 5' YRNA-derived fragment
tccccccacaaccgcgcttgactagcttgctg

SEQ ID NO: 25161 - DNA, 35 bp, Artificial Sequence
  synthetic circulating small noncoding RNA (sncRNA) 5' YRNA-derived fragment
aaaaccagtcaaatttagcagtagggggttgtata

SEQ ID NO: 25162 - DNA, 18 bp, Artificial Sequence
  synthetic circulating small noncoding RNA (sncRNA) 5' YRNA-derived fragment
tagccagtcaaatttagc

SEQ ID NO: 25163 - DNA, 36 bp, Artificial Sequence
  synthetic circulating small noncoding RNA (sncRNA) 5' YRNA-derived fragment
tgctagtctgatggtagtgggttatcagaacttatt

SEQ ID NO: 25164 - DNA, 34 bp, Artificial Sequence
  synthetic circulating small noncoding RNA (sncRNA) 5' YRNA-derived fragment
ggctggtcagaaggtagtgagttatctcaattgt

SEQ ID NO: 25165 - DNA, 26 bp, Artificial Sequence
  synthetic circulating small noncoding RNA (sncRNA) 5' YRNA-derived fragment
aagacagtcaaatttagcagtggaga

SEQ ID NO: 25166 - DNA, 29 bp, Artificial Sequence
  synthetic circulating small noncoding RNA (sncRNA) 5' YRNA-derived fragment
ggctggtcctatggtagtgggttatcaga

SEQ ID NO: 25167 - DNA, 19 bp, Artificial Sequence
  synthetic circulating small noncoding RNA (sncRNA) 5' YRNA-derived fragment
cttctcactactgcacttg

SEQ ID NO: 25168 - DNA, 27 bp, Artificial Sequence
  synthetic circulating small noncoding RNA (sncRNA) 5' YRNA-derived fragment
ctccccgctgctaaatttggctggctt

SEQ ID NO: 25169 - DNA, 26 bp, Artificial Sequence
  synthetic circulating small noncoding RNA (sncRNA) 5' YRNA-derived fragment
ggctggtccgatggtagtgggttacc

SEQ ID NO: 25170 - DNA, 39 bp, Artificial Sequence
  synthetic circulating small noncoding RNA (sncRNA) 5' YRNA-derived fragment
gttccttctccactcccactgcttcacttgactagccta

SEQ ID NO: 25171 - DNA, 19 bp, Artificial Sequence
  synthetic circulating small noncoding RNA (sncRNA) 5' YRNA-derived fragment
ctgcttcacttgactagtt

SEQ ID NO: 25172 - DNA, 38 bp, Artificial Sequence
  synthetic circulating small noncoding RNA (sncRNA) 5' YRNA-derived fragment
ggctggtccgatggtagtgatttatcagaacttattaa

SEQ ID NO: 25173 - DNA, 26 bp, Artificial Sequence
  synthetic circulating small noncoding RNA (sncRNA) 5' YRNA-derived fragment
agccagtcaaatttatcagagggggg

SEQ ID NO: 25174 - DNA, 25 bp, Artificial Sequence
  synthetic circulating small noncoding RNA (sncRNA) 5' YRNA-derived fragment
ccgatggtagcgggttatcagaacc

SEQ ID NO: 25175 - DNA, 19 bp, Artificial Sequence
  synthetic circulating small noncoding RNA (sncRNA) 5' YRNA-derived fragment
cactgcactcggaccagcc

SEQ ID NO: 25176 - DNA, 20 bp, Artificial Sequence
  synthetic circulating small noncoding RNA (sncRNA) 5' YRNA-derived fragment
aagttctgataaccccctac

SEQ ID NO: 25177 - DNA, 29 bp, Artificial Sequence
  synthetic circulating small noncoding RNA (sncRNA) 5' YRNA-derived fragment
ggctggtcagatggtagtgggttatcaga

SEQ ID NO: 25178 - DNA, 22 bp, Artificial Sequence
  synthetic circulating small noncoding RNA (sncRNA) 5' YRNA-derived fragment
tagccagtcaaatttagcagtg

SEQ ID NO: 25179 - DNA, 27 bp, Artificial Sequence
  synthetic circulating small noncoding RNA (sncRNA) 5' YRNA-derived fragment
caagccagtcaaatttagcagtggggt

SEQ ID NO: 25180 - DNA, 41 bp, Artificial Sequence
  synthetic circulating small noncoding RNA (sncRNA) 5' YRNA-derived fragment
atgttaataagttctgataacccactaccatcggaccagtc

SEQ ID NO: 25181 - DNA, 28 bp, Artificial Sequence
  synthetic circulating small noncoding RNA (sncRNA) 5' YRNA-derived fragment
ggttcgatggcagtgggttatcagaact

SEQ ID NO: 25182 - DNA, 25 bp, Artificial Sequence
  synthetic circulating small noncoding RNA (sncRNA) 5' YRNA-derived fragment
ttccactgcttcacttgactagcct

SEQ ID NO: 25183 - DNA, 18 bp, Artificial Sequence
  synthetic circulating small noncoding RNA (sncRNA) 5' YRNA-derived fragment
gctggtccgatggtagtg

SEQ ID NO: 25184 - DNA, 24 bp, Artificial Sequence
  synthetic circulating small noncoding RNA (sncRNA) 5' YRNA-derived fragment
tccgagtgttgtgggttattgtta

SEQ ID NO: 25185 - DNA, 31 bp, Artificial Sequence
  synthetic circulating small noncoding RNA (sncRNA) 5' YRNA-derived fragment
actgagataactcactacctttggacaagcc

SEQ ID NO: 25186 - DNA, 27 bp, Artificial Sequence
  synthetic circulating small noncoding RNA (sncRNA) 5' YRNA-derived fragment
gtaaacaccactgcactcggaccagcc

SEQ ID NO: 25187 - DNA, 20 bp, Artificial Sequence
  synthetic circulating small noncoding RNA (sncRNA) 5' YRNA-derived fragment
cccccactgctaaatttgac

SEQ ID NO: 25188 - DNA, 25 bp, Artificial Sequence
  synthetic circulating small noncoding RNA (sncRNA) 5' YRNA-derived fragment
agctagtcaagtgaagcagtgggag

SEQ ID NO: 25189 - DNA, 31 bp, Artificial Sequence
  synthetic circulating small noncoding RNA (sncRNA) 5' YRNA-derived fragment
aaccccccactgctaaatttgactggctttt

SEQ ID NO: 25190 - DNA, 35 bp, Artificial Sequence
  synthetic circulating small noncoding RNA (sncRNA) 5' YRNA-derived fragment
tctccactcccactgcttcacttgactagcctttt

SEQ ID NO: 25191 - DNA, 31 bp, Artificial Sequence
  synthetic circulating small noncoding RNA (sncRNA) 5' YRNA-derived fragment
accagtcaaatttagcagtggggggttgtat

SEQ ID NO: 25192 - DNA, 30 bp, Artificial Sequence
  synthetic circulating small noncoding RNA (sncRNA) 5' YRNA-derived fragment
agttgtaaacaccactgcactcggaccagc

SEQ ID NO: 25193 - DNA, 36 bp, Artificial Sequence
  synthetic circulating small noncoding RNA (sncRNA) 5' YRNA-derived fragment
agactagtcaagtgcagtagtgagaaggggggaaag

SEQ ID NO: 25194 - DNA, 32 bp, Artificial Sequence
  synthetic circulating small noncoding RNA (sncRNA) 5' YRNA-derived fragment
aagttctgataacccactaccattggaccacc

SEQ ID NO: 25195 - DNA, 28 bp, Artificial Sequence
  synthetic circulating small noncoding RNA (sncRNA) 5' YRNA-derived fragment
ggctggtcctatggtagtgggttatcag

SEQ ID NO: 25196 - DNA, 18 bp, Artificial Sequence
  synthetic circulating small noncoding RNA (sncRNA) 5' YRNA-derived fragment
ttgtgggttagcagaact

SEQ ID NO: 25197 - DNA, 30 bp, Artificial Sequence
  synthetic circulating small noncoding RNA (sncRNA) 5' YRNA-derived fragment
ttgagataactcactacctttgggccagcc

SEQ ID NO: 25198 - DNA, 30 bp, Artificial Sequence
  synthetic circulating small noncoding RNA (sncRNA) 5' YRNA-derived fragment
ggctggtctgaaggtagtgagttatctcag

SEQ ID NO: 25199 - DNA, 32 bp, Artificial Sequence
  synthetic circulating small noncoding RNA (sncRNA) 5' YRNA-derived fragment
ggctggtctgaaggtagtgagttacctcaatt

SEQ ID NO: 25200 - DNA, 31 bp, Artificial Sequence
  synthetic circulating small noncoding RNA (sncRNA) 5' YRNA-derived fragment
ataagttctgataacccactaccatcggacc

SEQ ID NO: 25201 - DNA, 26 bp, Artificial Sequence
  synthetic circulating small noncoding RNA (sncRNA) 5' YRNA-derived fragment
ttctgataacccactaccatcggacc

SEQ ID NO: 25202 - DNA, 23 bp, Artificial Sequence
  synthetic circulating small noncoding RNA (sncRNA) 5' YRNA-derived fragment
cagatcgaactccttgttctact

SEQ ID NO: 25203 - DNA, 31 bp, Artificial Sequence
  synthetic circulating small noncoding RNA (sncRNA) 5' YRNA-derived fragment
ggctggtctgatagtagtgggttatcagaaa

SEQ ID NO: 25204 - DNA, 30 bp, Artificial Sequence
  synthetic circulating small noncoding RNA (sncRNA) 5' YRNA-derived fragment
tttagccagtcagattttagcagtgggggg

SEQ ID NO: 25205 - DNA, 27 bp, Artificial Sequence
  synthetic circulating small noncoding RNA (sncRNA) 5' YRNA-derived fragment
ttggtccgagtgttgtgggttattgtt

SEQ ID NO: 25206 - DNA, 22 bp, Artificial Sequence
  synthetic circulating small noncoding RNA (sncRNA) 5' YRNA-derived fragment
cccccacaaccgcgcttgacta

SEQ ID NO: 25207 - DNA, 34 bp, Artificial Sequence
  synthetic circulating small noncoding RNA (sncRNA) 5' YRNA-derived fragment
ccttctccactcccactgcttcacttgactagcc

SEQ ID NO: 25208 - DNA, 18 bp, Artificial Sequence
  synthetic circulating small noncoding RNA (sncRNA) 5' YRNA-derived fragment
cccacaaccgcgcttgac

SEQ ID NO: 25209 - DNA, 31 bp, Artificial Sequence
  synthetic circulating small noncoding RNA (sncRNA) 5' YRNA-derived fragment
attgagctaactcactacctttggacatgcc

SEQ ID NO: 25210 - DNA, 39 bp, Artificial Sequence
  synthetic circulating small noncoding RNA (sncRNA) 5' YRNA-derived fragment
ctactctttccccccttctcactactgcacttgactagt

SEQ ID NO: 25211 - DNA, 30 bp, Artificial Sequence
  synthetic circulating small noncoding RNA (sncRNA) 5' YRNA-derived fragment
ggctgctccaaaggtagtgagttatctcaa

SEQ ID NO: 25212 - DNA, 32 bp, Artificial Sequence
  synthetic circulating small noncoding RNA (sncRNA) 5' YRNA-derived fragment
agttctgagaacccaataccatcagaccagct

SEQ ID NO: 25213 - DNA, 38 bp, Artificial Sequence
  synthetic circulating small noncoding RNA (sncRNA) 5' YRNA-derived fragment
tttgttccttctccactcccactgcttcacttgactag

SEQ ID NO: 25214 - DNA, 28 bp, Artificial Sequence
  synthetic circulating small noncoding RNA (sncRNA) 5' YRNA-derived fragment
taggctagtcaagtgaagcagtgggagt

SEQ ID NO: 25215 - DNA, 32 bp, Artificial Sequence
  synthetic circulating small noncoding RNA (sncRNA) 5' YRNA-derived fragment
aagccagtcaaatttagcagtgggggattgtc

SEQ ID NO: 25216 - DNA, 31 bp, Artificial Sequence
  synthetic circulating small noncoding RNA (sncRNA) 5' YRNA-derived fragment
ttgagataactcactaccttcggaccagcca

SEQ ID NO: 25217 - DNA, 30 bp, Artificial Sequence
  synthetic circulating small noncoding RNA (sncRNA) 5' YRNA-derived fragment
ggctggtctgaaggtagtgagttacctcaa

SEQ ID NO: 25218 - DNA, 31 bp, Artificial Sequence
  synthetic circulating small noncoding RNA (sncRNA) 5' YRNA-derived fragment
attgagataactcactaccttcagaccagtc

SEQ ID NO: 25219 - DNA, 28 bp, Artificial Sequence
  synthetic circulating small noncoding RNA (sncRNA) 5' YRNA-derived fragment
taaggctagtcaagtgaagcagtgggag

SEQ ID NO: 25220 - DNA, 27 bp, Artificial Sequence
  synthetic circulating small noncoding RNA (sncRNA) 5' YRNA-derived fragment
cccccactgctaaattttactagcttt

SEQ ID NO: 25221 - DNA, 39 bp, Artificial Sequence
  synthetic circulating small noncoding RNA (sncRNA) 5' YRNA-derived fragment
aacaatcaattgagataacccactaccttcggacgagcc

SEQ ID NO: 25222 - DNA, 21 bp, Artificial Sequence
  synthetic circulating small noncoding RNA (sncRNA) 5' YRNA-derived fragment
gaaggtagtgagttatctcaa

SEQ ID NO: 25223 - DNA, 34 bp, Artificial Sequence
  synthetic circulating small noncoding RNA (sncRNA) 5' YRNA-derived fragment
gttggtccgagtgttgtgggttattgttaagttg

SEQ ID NO: 25224 - DNA, 26 bp, Artificial Sequence
  synthetic circulating small noncoding RNA (sncRNA) 5' YRNA-derived fragment
cttctcactactgcacttgactagac

SEQ ID NO: 25225 - DNA, 27 bp, Artificial Sequence
  synthetic circulating small noncoding RNA (sncRNA) 5' YRNA-derived fragment
tcagccagtcaaatttagcagtggggg

SEQ ID NO: 25226 - DNA, 23 bp, Artificial Sequence
  synthetic circulating small noncoding RNA (sncRNA) 5' YRNA-derived fragment
cttaacaataacccacaacactc

SEQ ID NO: 25227 - DNA, 30 bp, Artificial Sequence
  synthetic circulating small noncoding RNA (sncRNA) 5' YRNA-derived fragment
ggctggtcctatggtagtgggttatcagaa

SEQ ID NO: 25228 - DNA, 30 bp, Artificial Sequence
  synthetic circulating small noncoding RNA (sncRNA) 5' YRNA-derived fragment
actagtcaagtgaagcagtgggagtggaga

SEQ ID NO: 25229 - DNA, 42 bp, Artificial Sequence
  synthetic circulating small noncoding RNA (sncRNA) 5' YRNA-derived fragment
cagccagtcaaatttagcagtggggggttgtataccaacttt

SEQ ID NO: 25230 - DNA, 32 bp, Artificial Sequence
  synthetic circulating small noncoding RNA (sncRNA) 5' YRNA-derived fragment
aattgagataactcactacctttggaccagcc

SEQ ID NO: 25231 - DNA, 29 bp, Artificial Sequence
  synthetic circulating small noncoding RNA (sncRNA) 5' YRNA-derived fragment
aaaaaccagtcaaatttagcagtaggggg

SEQ ID NO: 25232 - DNA, 32 bp, Artificial Sequence
  synthetic circulating small noncoding RNA (sncRNA) 5' YRNA-derived fragment
cagttggtccgagtgttgtgggttattgttaa

SEQ ID NO: 25233 - DNA, 27 bp, Artificial Sequence
  synthetic circulating small noncoding RNA (sncRNA) 5' YRNA-derived fragment
gtctgatggtagtgggttatcagaact

SEQ ID NO: 25234 - DNA, 28 bp, Artificial Sequence
  synthetic circulating small noncoding RNA (sncRNA) 5' YRNA-derived fragment
gagataactcactacctttggaccagac

SEQ ID NO: 25235 - DNA, 22 bp, Artificial Sequence
  synthetic circulating small noncoding RNA (sncRNA) 5' YRNA-derived fragment
cccactcctaaatttgcctggc

SEQ ID NO: 25236 - DNA, 32 bp, Artificial Sequence
  synthetic circulating small noncoding RNA (sncRNA) 5' YRNA-derived fragment
aggctggtccgatggtagtgggttatcagaac

SEQ ID NO: 25237 - DNA, 27 bp, Artificial Sequence
  synthetic circulating small noncoding RNA (sncRNA) 5' YRNA-derived fragment
gtctgatggtagtgggttatcaggact

SEQ ID NO: 25238 - DNA, 27 bp, Artificial Sequence
  synthetic circulating small noncoding RNA (sncRNA) 5' YRNA-derived fragment
agttctgataaccccctaccatgggac

SEQ ID NO: 25239 - DNA, 35 bp, Artificial Sequence
  synthetic circulating small noncoding RNA (sncRNA) 5' YRNA-derived fragment
ggcttgtctgatggtagtgggttatcagaacttat

SEQ ID NO: 25240 - DNA, 26 bp, Artificial Sequence
  synthetic circulating small noncoding RNA (sncRNA) 5' YRNA-derived fragment
aaccccccactgctaaatttgactgg

SEQ ID NO: 25241 - DNA, 22 bp, Artificial Sequence
  synthetic circulating small noncoding RNA (sncRNA) 5' YRNA-derived fragment
ggctggtccgatggtagcgggt

SEQ ID NO: 25242 - DNA, 24 bp, Artificial Sequence
  synthetic circulating small noncoding RNA (sncRNA) 5' YRNA-derived fragment
actagtcaagtgcaggagtgagaa

SEQ ID NO: 25243 - DNA, 21 bp, Artificial Sequence
  synthetic circulating small noncoding RNA (sncRNA) 5' YRNA-derived fragment
agtgtcactaaagttggtata

SEQ ID NO: 25244 - DNA, 38 bp, Artificial Sequence
  synthetic circulating small noncoding RNA (sncRNA) 5' YRNA-derived fragment
tttaacattgtctccccccacaaccgcgcttgactagc

SEQ ID NO: 25245 - DNA, 22 bp, Artificial Sequence
  synthetic circulating small noncoding RNA (sncRNA) 5' YRNA-derived fragment
ttaagttctgataacccactac

SEQ ID NO: 25246 - DNA, 20 bp, Artificial Sequence
  synthetic circulating small noncoding RNA (sncRNA) 5' YRNA-derived fragment
ccactgcactcggaccagcc

SEQ ID NO: 25247 - DNA, 30 bp, Artificial Sequence
  synthetic circulating small noncoding RNA (sncRNA) 5' YRNA-derived fragment
ggctgatctgaaggtagtgagttatctcaa

SEQ ID NO: 25248 - DNA, 18 bp, Artificial Sequence
  synthetic circulating small noncoding RNA (sncRNA) 5' YRNA-derived fragment
tagcaggttatcagaact

SEQ ID NO: 25249 - DNA, 18 bp, Artificial Sequence
  synthetic circulating small noncoding RNA (sncRNA) 5' YRNA-derived fragment
tagcgggttatcagaacc

SEQ ID NO: 25250 - DNA, 18 bp, Artificial Sequence
  synthetic circulating small noncoding RNA (sncRNA) 5' YRNA-derived fragment
actgcactcggaccagcc

SEQ ID NO: 25251 - DNA, 47 bp, Artificial Sequence
  synthetic circulating small noncoding RNA (sncRNA) 5' YRNA-derived fragment
ttagtgtcactaaagttggtatacaaccccccactgctaaatttgac

SEQ ID NO: 25252 - DNA, 32 bp, Artificial Sequence
  synthetic circulating small noncoding RNA (sncRNA) 5' YRNA-derived fragment
gtagaacaaggagttcgatctgtaactgactg

SEQ ID NO: 25253 - DNA, 21 bp, Artificial Sequence
  synthetic circulating small noncoding RNA (sncRNA) 5' YRNA-derived fragment
taagttctgataacccactac

SEQ ID NO: 25254 - DNA, 18 bp, Artificial Sequence
  synthetic circulating small noncoding RNA (sncRNA) 5' YRNA-derived fragment
ctgcttcacttgactagc

SEQ ID NO: 25255 - DNA, 25 bp, Artificial Sequence
  synthetic circulating small noncoding RNA (sncRNA) 5' YRNA-derived fragment
aagccagtcaaatttagcagtggag

SEQ ID NO: 25256 - DNA, 38 bp, Artificial Sequence
  synthetic circulating small noncoding RNA (sncRNA) 5' YRNA-derived fragment
ttgttccttctccactcccactgcttcacttgactaga

SEQ ID NO: 25257 - DNA, 37 bp, Artificial Sequence
  synthetic circulating small noncoding RNA (sncRNA) 5' YRNA-derived fragment
ttccttctccactcccactgcttcacttgactagcct

SEQ ID NO: 25258 - DNA, 19 bp, Artificial Sequence
  synthetic circulating small noncoding RNA (sncRNA) 5' YRNA-derived fragment
taacaataacccacaacac

SEQ ID NO: 25259 - DNA, 26 bp, Artificial Sequence
  synthetic circulating small noncoding RNA (sncRNA) 5' YRNA-derived fragment
ggctggtcagatggtagtgggttatc

SEQ ID NO: 25260 - DNA, 27 bp, Artificial Sequence
  synthetic circulating small noncoding RNA (sncRNA) 5' YRNA-derived fragment
agttctgataacccactaccatcagac

SEQ ID NO: 25261 - DNA, 22 bp, Artificial Sequence
  synthetic circulating small noncoding RNA (sncRNA) 5' YRNA-derived fragment
aataagttctgataaccaacta

SEQ ID NO: 25262 - DNA, 22 bp, Artificial Sequence
  synthetic circulating small noncoding RNA (sncRNA) 5' YRNA-derived fragment
attagtgtcactaaagttggta

SEQ ID NO: 25263 - DNA, 28 bp, Artificial Sequence
  synthetic circulating small noncoding RNA (sncRNA) 5' YRNA-derived fragment
ggtccgatggtagcaggttatcagaact

SEQ ID NO: 25264 - DNA, 44 bp, Artificial Sequence
  synthetic circulating small noncoding RNA (sncRNA) 5' YRNA-derived fragment
cagccagtcaaatttagcagtggggggttgtataccaactttag

SEQ ID NO: 25265 - DNA, 31 bp, Artificial Sequence
  synthetic circulating small noncoding RNA (sncRNA) 5' YRNA-derived fragment
gactggtctgaaggtagtgagttgtctcaat

SEQ ID NO: 25266 - DNA, 28 bp, Artificial Sequence
  synthetic circulating small noncoding RNA (sncRNA) 5' YRNA-derived fragment
ctcccccactgctaaatttgactggctt

SEQ ID NO: 25267 - DNA, 35 bp, Artificial Sequence
  synthetic circulating small noncoding RNA (sncRNA) 5' YRNA-derived fragment
gtatacaaccccccactgctaaatttgactggctt

SEQ ID NO: 25268 - DNA, 33 bp, Artificial Sequence
  synthetic circulating small noncoding RNA (sncRNA) 5' YRNA-derived fragment
aggatagtcaagtgaagcagtgggagtggagaa

SEQ ID NO: 25269 - DNA, 28 bp, Artificial Sequence
  synthetic circulating small noncoding RNA (sncRNA) 5' YRNA-derived fragment
taacattagtgtcactaaagttggtata

SEQ ID NO: 25270 - DNA, 32 bp, Artificial Sequence
  synthetic circulating small noncoding RNA (sncRNA) 5' YRNA-derived fragment
aagccagtcaaatttagcagtgaggggttgta

SEQ ID NO: 25271 - DNA, 26 bp, Artificial Sequence
  synthetic circulating small noncoding RNA (sncRNA) 5' YRNA-derived fragment
gatggtagtgggttatcagaacttat

SEQ ID NO: 25272 - DNA, 20 bp, Artificial Sequence
  synthetic circulating small noncoding RNA (sncRNA) 5' YRNA-derived fragment
taagttctgataacccacta

SEQ ID NO: 25273 - DNA, 40 bp, Artificial Sequence
  synthetic circulating small noncoding RNA (sncRNA) 5' YRNA-derived fragment
gctggtccgatggtagtgggttatcagaacttattaacat

SEQ ID NO: 25274 - DNA, 29 bp, Artificial Sequence
  synthetic circulating small noncoding RNA (sncRNA) 5' YRNA-derived fragment
accagtcaaatttagcagtggggggttgt

SEQ ID NO: 25275 - DNA, 31 bp, Artificial Sequence
  synthetic circulating small noncoding RNA (sncRNA) 5' YRNA-derived fragment
gctggtccgatggtagcaggttatcagaact

SEQ ID NO: 25276 - DNA, 30 bp, Artificial Sequence
  synthetic circulating small noncoding RNA (sncRNA) 5' YRNA-derived fragment
ctccactcccactgcttcacttgactagcc

SEQ ID NO: 25277 - DNA, 26 bp, Artificial Sequence
  synthetic circulating small noncoding RNA (sncRNA) 5' YRNA-derived fragment
tgactagtcaagtgcagtagtgagaa

SEQ ID NO: 25278 - DNA, 34 bp, Artificial Sequence
  synthetic circulating small noncoding RNA (sncRNA) 5' YRNA-derived fragment
taaattctgataacccactaccatcagaccagcc

SEQ ID NO: 25279 - DNA, 29 bp, Artificial Sequence
  synthetic circulating small noncoding RNA (sncRNA) 5' YRNA-derived fragment
aagttctgataacccactaccatccgaca

SEQ ID NO: 25280 - DNA, 26 bp, Artificial Sequence
  synthetic circulating small noncoding RNA (sncRNA) 5' YRNA-derived fragment
aagctagtcaaatttagcagtggggg

SEQ ID NO: 25281 - DNA, 23 bp, Artificial Sequence
  synthetic circulating small noncoding RNA (sncRNA) 5' YRNA-derived fragment
ccagtcaaatttagcagtggggg

SEQ ID NO: 25282 - DNA, 23 bp, Artificial Sequence
  synthetic circulating small noncoding RNA (sncRNA) 5' YRNA-derived fragment
ggctggtccgatggtagcgggtt

SEQ ID NO: 25283 - DNA, 32 bp, Artificial Sequence
  synthetic circulating small noncoding RNA (sncRNA) 5' YRNA-derived fragment
ggctgctctgatagtagtgggttatcagaaca

SEQ ID NO: 25284 - DNA, 18 bp, Artificial Sequence
  synthetic circulating small noncoding RNA (sncRNA) 5' YRNA-derived fragment
ttaacaataacccacaac

SEQ ID NO: 25285 - DNA, 42 bp, Artificial Sequence
  synthetic circulating small noncoding RNA (sncRNA) 5' YRNA-derived fragment
gactagtcaagtgaagcagtgggagtggagaaggaacaaaga

SEQ ID NO: 25286 - DNA, 38 bp, Artificial Sequence
  synthetic circulating small noncoding RNA (sncRNA) 5' YRNA-derived fragment
ttgttccttctccactcccactgcttcacttgactagc

SEQ ID NO: 25287 - DNA, 26 bp, Artificial Sequence
  synthetic circulating small noncoding RNA (sncRNA) 5' YRNA-derived fragment
aagctagtcaaatttagcagtgggga

SEQ ID NO: 25288 - DNA, 18 bp, Artificial Sequence
  synthetic circulating small noncoding RNA (sncRNA) 5' YRNA-derived fragment
ggctggtccgagtgcagt

SEQ ID NO: 25289 - DNA, 29 bp, Artificial Sequence
  synthetic circulating small noncoding RNA (sncRNA) 5' YRNA-derived fragment
ttaaaccagtcaaatttagcagtgggggg

SEQ ID NO: 25290 - DNA, 25 bp, Artificial Sequence
  synthetic circulating small noncoding RNA (sncRNA) 5' YRNA-derived fragment
tacagatcgaactccttgttctact

SEQ ID NO: 25291 - DNA, 39 bp, Artificial Sequence
  synthetic circulating small noncoding RNA (sncRNA) 5' YRNA-derived fragment
actaattgatcacaaccagttacagatttctttgttcct

SEQ ID NO: 25292 - DNA, 28 bp, Artificial Sequence
  synthetic circulating small noncoding RNA (sncRNA) 5' YRNA-derived fragment
ctgataacccactaccattggaccaggc

SEQ ID NO: 25293 - DNA, 26 bp, Artificial Sequence
  synthetic circulating small noncoding RNA (sncRNA) 5' YRNA-derived fragment
agctctgacaacccactaccatcgga

SEQ ID NO: 25294 - DNA, 26 bp, Artificial Sequence
  synthetic circulating small noncoding RNA (sncRNA) 5' YRNA-derived fragment
aagccagttaaatttagcagtcaggg

SEQ ID NO: 25295 - DNA, 29 bp, Artificial Sequence
  synthetic circulating small noncoding RNA (sncRNA) 5' YRNA-derived fragment
cagaacttattaacattagtgtcactaaa

SEQ ID NO: 25296 - DNA, 33 bp, Artificial Sequence
  synthetic circulating small noncoding RNA (sncRNA) 5' YRNA-derived fragment
agttctgataacccactaccatcggaccagtcc

SEQ ID NO: 25297 - DNA, 19 bp, Artificial Sequence
  synthetic circulating small noncoding RNA (sncRNA) 5' YRNA-derived fragment
aacaataacccacaacact

SEQ ID NO: 25298 - DNA, 23 bp, Artificial Sequence
  synthetic circulating small noncoding RNA (sncRNA) 5' YRNA-derived fragment
aggctagtcaagtgaagcagtgg

SEQ ID NO: 25299 - DNA, 34 bp, Artificial Sequence
  synthetic circulating small noncoding RNA (sncRNA) 5' YRNA-derived fragment
attagttgtaaacaccactgcactcggaccagcc

SEQ ID NO: 25300 - DNA, 32 bp, Artificial Sequence
  synthetic circulating small noncoding RNA (sncRNA) 5' YRNA-derived fragment
ggccggtctgaaggtagtgagttatctcaatt

SEQ ID NO: 25301 - DNA, 34 bp, Artificial Sequence
  synthetic circulating small noncoding RNA (sncRNA) 5' YRNA-derived fragment
ggctggtctgaaggtagtgagttatctcaattgt

SEQ ID NO: 25302 - DNA, 31 bp, Artificial Sequence
  synthetic circulating small noncoding RNA (sncRNA) 5' YRNA-derived fragment
gggctggtctgaaggtagtgagttatctcaa

SEQ ID NO: 25303 - DNA, 31 bp, Artificial Sequence
  synthetic circulating small noncoding RNA (sncRNA) 5' YRNA-derived fragment
cgttgtaaacaccactgcactcggaccagcc

SEQ ID NO: 25304 - DNA, 30 bp, Artificial Sequence
  synthetic circulating small noncoding RNA (sncRNA) 5' YRNA-derived fragment
ttgagataactcactacctttggtccagcc

SEQ ID NO: 25305 - DNA, 27 bp, Artificial Sequence
  synthetic circulating small noncoding RNA (sncRNA) 5' YRNA-derived fragment
ccacaaccgcgcttgactagcttgctg

SEQ ID NO: 25306 - DNA, 24 bp, Artificial Sequence
  synthetic circulating small noncoding RNA (sncRNA) 5' YRNA-derived fragment
ctggtccgatggtagtgggttatc

SEQ ID NO: 25307 - DNA, 42 bp, Artificial Sequence
  synthetic circulating small noncoding RNA (sncRNA) 5' YRNA-derived fragment
ctaaagttggtatacaaccccccactgctaaatttgactggc

SEQ ID NO: 25308 - DNA, 18 bp, Artificial Sequence
  synthetic circulating small noncoding RNA (sncRNA) 5' YRNA-derived fragment
atttctgataacccacta

SEQ ID NO: 25309 - DNA, 22 bp, Artificial Sequence
  synthetic circulating small noncoding RNA (sncRNA) 5' YRNA-derived fragment
ttctcactactgcacttgacta

SEQ ID NO: 25310 - DNA, 27 bp, Artificial Sequence
  synthetic circulating small noncoding RNA (sncRNA) 5' YRNA-derived fragment
ggtccgatggtagcgggttatcagaac

SEQ ID NO: 25311 - DNA, 22 bp, Artificial Sequence
  synthetic circulating small noncoding RNA (sncRNA) 5' YRNA-derived fragment
ttgagataactcactaccttcg

SEQ ID NO: 25312 - DNA, 39 bp, Artificial Sequence
  synthetic circulating small noncoding RNA (sncRNA) 5' YRNA-derived fragment
ggctggtccgatggtagtgggttaccagaacttaataac

SEQ ID NO: 25313 - DNA, 20 bp, Artificial Sequence
  synthetic circulating small noncoding RNA (sncRNA) 5' YRNA-derived fragment
aagccagtaaaatttagcag

SEQ ID NO: 25314 - DNA, 31 bp, Artificial Sequence
  synthetic circulating small noncoding RNA (sncRNA) 5' YRNA-derived fragment
attgagataactcactaccctcagactagcc

SEQ ID NO: 25315 - DNA, 29 bp, Artificial Sequence
  synthetic circulating small noncoding RNA (sncRNA) 5' YRNA-derived fragment
aaagactagtcaagtgcagtagtgagaag

SEQ ID NO: 25316 - DNA, 30 bp, Artificial Sequence
  synthetic circulating small noncoding RNA (sncRNA) 5' YRNA-derived fragment
gatggtccgaaggtagtgagttatctcaat

SEQ ID NO: 25317 - DNA, 23 bp, Artificial Sequence
  synthetic circulating small noncoding RNA (sncRNA) 5' YRNA-derived fragment
aaaccactgcactcggaccagcc

SEQ ID NO: 25318 - DNA, 38 bp, Artificial Sequence
  synthetic circulating small noncoding RNA (sncRNA) 5' YRNA-derived fragment
tgttccttctccactcccactgcttcacttgactagcc

SEQ ID NO: 25319 - DNA, 26 bp, Artificial Sequence
  synthetic circulating small noncoding RNA (sncRNA) 5' YRNA-derived fragment
aagccagtcaaatttagcagtggggt

SEQ ID NO: 25320 - DNA, 29 bp, Artificial Sequence
  synthetic circulating small noncoding RNA (sncRNA) 5' YRNA-derived fragment
actagtcaagtgaagcagtgggagtggag

SEQ ID NO: 25321 - DNA, 25 bp, Artificial Sequence
  synthetic circulating small noncoding RNA (sncRNA) 5' YRNA-derived fragment
agttctgataacccactactatcgg

SEQ ID NO: 25322 - DNA, 21 bp, Artificial Sequence
  synthetic circulating small noncoding RNA (sncRNA) 5' YRNA-derived fragment
acaaccgcgcttgactagctt

SEQ ID NO: 25323 - DNA, 31 bp, Artificial Sequence
  synthetic circulating small noncoding RNA (sncRNA) 5' YRNA-derived fragment
ggctggtctgaaggtagtgagttatttcaat

SEQ ID NO: 25324 - DNA, 44 bp, Artificial Sequence
  synthetic circulating small noncoding RNA (sncRNA) 5' YRNA-derived fragment
cactaaagttggtatacaaccccccactgctaaatttgactggc

SEQ ID NO: 25325 - DNA, 40 bp, Artificial Sequence
  synthetic circulating small noncoding RNA (sncRNA) 5' YRNA-derived fragment
tttgttccttctccactcccactgcttcacttgactagaa

SEQ ID NO: 25326 - DNA, 31 bp, Artificial Sequence
  synthetic circulating small noncoding RNA (sncRNA) 5' YRNA-derived fragment
ttttagccagtcagattttagcagtgggggg

SEQ ID NO: 25327 - DNA, 18 bp, Artificial Sequence
  synthetic circulating small noncoding RNA (sncRNA) 5' YRNA-derived fragment
tgctaaatttgactggct

SEQ ID NO: 25328 - DNA, 31 bp, Artificial Sequence
  synthetic circulating small noncoding RNA (sncRNA) 5' YRNA-derived fragment
tccgatggtagtgggttatcagaacttatta

SEQ ID NO: 25329 - DNA, 20 bp, Artificial Sequence
  synthetic circulating small noncoding RNA (sncRNA) 5' YRNA-derived fragment
cgctgctaaatttgactggc

SEQ ID NO: 25330 - DNA, 32 bp, Artificial Sequence
  synthetic circulating small noncoding RNA (sncRNA) 5' YRNA-derived fragment
agttctgataacacactgccatgggcccagcc

SEQ ID NO: 25331 - DNA, 27 bp, Artificial Sequence
  synthetic circulating small noncoding RNA (sncRNA) 5' YRNA-derived fragment
aaagccagtcaaatttagcagtagggg

SEQ ID NO: 25332 - DNA, 28 bp, Artificial Sequence
  synthetic circulating small noncoding RNA (sncRNA) 5' YRNA-derived fragment
taagccagtcacatttagcagtgtgggg

SEQ ID NO: 25333 - DNA, 21 bp, Artificial Sequence
  synthetic circulating small noncoding RNA (sncRNA) 5' YRNA-derived fragment
cagatttctttgttccttctc

SEQ ID NO: 25334 - DNA, 36 bp, Artificial Sequence
  synthetic circulating small noncoding RNA (sncRNA) 5' YRNA-derived fragment
ttggtatacaaccccccactgctaaatttgactggc

SEQ ID NO: 25335 - DNA, 32 bp, Artificial Sequence
  synthetic circulating small noncoding RNA (sncRNA) 5' YRNA-derived fragment
agttctgataacccattaccattggaccagct

SEQ ID NO: 25336 - DNA, 25 bp, Artificial Sequence
  synthetic circulating small noncoding RNA (sncRNA) 5' YRNA-derived fragment
taggctagtcaagtgaagcagtggg

SEQ ID NO: 25337 - DNA, 29 bp, Artificial Sequence
  synthetic circulating small noncoding RNA (sncRNA) 5' YRNA-derived fragment
gtccgatggtagtgggttatcagaactta

SEQ ID NO: 25338 - DNA, 25 bp, Artificial Sequence
  synthetic circulating small noncoding RNA (sncRNA) 5' YRNA-derived fragment
gccattcaaatttagcagtgggggg

SEQ ID NO: 25339 - DNA, 41 bp, Artificial Sequence
  synthetic circulating small noncoding RNA (sncRNA) 5' YRNA-derived fragment
agccagtcaaatttagcagtggggggttgtataccaacttt

SEQ ID NO: 25340 - DNA, 18 bp, Artificial Sequence
  synthetic circulating small noncoding RNA (sncRNA) 5' YRNA-derived fragment
tagtgggttatcaggact

SEQ ID NO: 25341 - DNA, 43 bp, Artificial Sequence
  synthetic circulating small noncoding RNA (sncRNA) 5' YRNA-derived fragment
tgtgaacaatcaattgagataactcactaccttcggaccagcc

SEQ ID NO: 25342 - DNA, 18 bp, Artificial Sequence
  synthetic circulating small noncoding RNA (sncRNA) 5' YRNA-derived fragment
aagttctgataacccact

SEQ ID NO: 25343 - DNA, 23 bp, Artificial Sequence
  synthetic circulating small noncoding RNA (sncRNA) 5' YRNA-derived fragment
aataagttctgataaccccctac

SEQ ID NO: 25344 - DNA, 34 bp, Artificial Sequence
  synthetic circulating small noncoding RNA (sncRNA) 5' YRNA-derived fragment
tctccccccacaaccgcgcttgactagcttgctg

SEQ ID NO: 25345 - DNA, 26 bp, Artificial Sequence
  synthetic circulating small noncoding RNA (sncRNA) 5' YRNA-derived fragment
gataactcactacctttggacaagcc

SEQ ID NO: 25346 - DNA, 25 bp, Artificial Sequence
  synthetic circulating small noncoding RNA (sncRNA) 5' YRNA-derived fragment
attagtgtcactaaagttggtatac

SEQ ID NO: 25347 - DNA, 26 bp, Artificial Sequence
  synthetic circulating small noncoding RNA (sncRNA) 5' YRNA-derived fragment
taaacaccactgcactcggaccagcc

SEQ ID NO: 25348 - DNA, 32 bp, Artificial Sequence
  synthetic circulating small noncoding RNA (sncRNA) 5' YRNA-derived fragment
ccttctccactcccactgcttcacttgactag

SEQ ID NO: 25349 - DNA, 23 bp, Artificial Sequence
  synthetic circulating small noncoding RNA (sncRNA) 5' YRNA-derived fragment
ccgagtgttgtgggttattgtta

SEQ ID NO: 25350 - DNA, 30 bp, Artificial Sequence
  synthetic circulating small noncoding RNA (sncRNA) 5' YRNA-derived fragment
ggctggtctgaaggtagtgagttatttcaa

SEQ ID NO: 25351 - DNA, 31 bp, Artificial Sequence
  synthetic circulating small noncoding RNA (sncRNA) 5' YRNA-derived fragment
actttagtgacactaatgttaataagttctg

SEQ ID NO: 25352 - DNA, 29 bp, Artificial Sequence
  synthetic circulating small noncoding RNA (sncRNA) 5' YRNA-derived fragment
tctgataacccactaccattggaccaggc

SEQ ID NO: 25353 - DNA, 20 bp, Artificial Sequence
  synthetic circulating small noncoding RNA (sncRNA) 5' YRNA-derived fragment
cactgcttcacttgactagc

SEQ ID NO: 25354 - DNA, 30 bp, Artificial Sequence
  synthetic circulating small noncoding RNA (sncRNA) 5' YRNA-derived fragment
ggctagtctgaaggtagtgagttctctcaa

SEQ ID NO: 25355 - DNA, 33 bp, Artificial Sequence
  synthetic circulating small noncoding RNA (sncRNA) 5' YRNA-derived fragment
ctccactcccactgcttcacttgactagccttt

SEQ ID NO: 25356 - DNA, 27 bp, Artificial Sequence
  synthetic circulating small noncoding RNA (sncRNA) 5' YRNA-derived fragment
aagccagtcaaatttagcagtggtagg

SEQ ID NO: 25357 - DNA, 23 bp, Artificial Sequence
  synthetic circulating small noncoding RNA (sncRNA) 5' YRNA-derived fragment
attgagataactcactaccttcg

SEQ ID NO: 25358 - DNA, 19 bp, Artificial Sequence
  synthetic circulating small noncoding RNA (sncRNA) 5' YRNA-derived fragment
actcccactgcttcacttg

SEQ ID NO: 25359 - DNA, 31 bp, Artificial Sequence
  synthetic circulating small noncoding RNA (sncRNA) 5' YRNA-derived fragment
cgatggtagtgggttatcagaacttattaac

SEQ ID NO: 25360 - DNA, 21 bp, Artificial Sequence
  synthetic circulating small noncoding RNA (sncRNA) 5' YRNA-derived fragment
actgcttcacttgactagtta

SEQ ID NO: 25361 - DNA, 35 bp, Artificial Sequence
  synthetic circulating small noncoding RNA (sncRNA) 5' YRNA-derived fragment
aattagttgtaaacaccactgcactcggaccagcc

SEQ ID NO: 25362 - DNA, 24 bp, Artificial Sequence
  synthetic circulating small noncoding RNA (sncRNA) 5' YRNA-derived fragment
ctgataacccactaccatcggacc

SEQ ID NO: 25363 - DNA, 21 bp, Artificial Sequence
  synthetic circulating small noncoding RNA (sncRNA) 5' YRNA-derived fragment
tagtgggttatcagaacttat

SEQ ID NO: 25364 - DNA, 38 bp, Artificial Sequence
  synthetic circulating small noncoding RNA (sncRNA) 5' YRNA-derived fragment
aaagttggtatacaaccccccactgctaaatttgactg

SEQ ID NO: 25365 - DNA, 35 bp, Artificial Sequence
  synthetic circulating small noncoding RNA (sncRNA) 5' YRNA-derived fragment
taagccagtcaaatttagcagttgggggttgtata

SEQ ID NO: 25366 - DNA, 31 bp, Artificial Sequence
  synthetic circulating small noncoding RNA (sncRNA) 5' YRNA-derived fragment
ggctgatctgaaggtagtgagttatctcaat

SEQ ID NO: 25367 - DNA, 26 bp, Artificial Sequence
  synthetic circulating small noncoding RNA (sncRNA) 5' YRNA-derived fragment
cccactgcttcacttgactagccttt

SEQ ID NO: 25368 - DNA, 25 bp, Artificial Sequence
  synthetic circulating small noncoding RNA (sncRNA) 5' YRNA-derived fragment
accccccactgctaaatttgactgg

SEQ ID NO: 25369 - DNA, 36 bp, Artificial Sequence
  synthetic circulating small noncoding RNA (sncRNA) 5' YRNA-derived fragment
tatacaaaccccccactgctaaatttgactggcttt

SEQ ID NO: 25370 - DNA, 35 bp, Artificial Sequence
  synthetic circulating small noncoding RNA (sncRNA) 5' YRNA-derived fragment
ggctggtccgagtgcagtggtgtttacaactaatt

SEQ ID NO: 25371 - DNA, 31 bp, Artificial Sequence
  synthetic circulating small noncoding RNA (sncRNA) 5' YRNA-derived fragment
gtccgatggtagtgggttatcagaacttatt

SEQ ID NO: 25372 - DNA, 27 bp, Artificial Sequence
  synthetic circulating small noncoding RNA (sncRNA) 5' YRNA-derived fragment
ttctcactactacacttgactagtctt

SEQ ID NO: 25373 - DNA, 40 bp, Artificial Sequence
  synthetic circulating small noncoding RNA (sncRNA) 5' YRNA-derived fragment
gttggtatacaaccccccactgctaaatttgactggcttt

SEQ ID NO: 25374 - DNA, 21 bp, Artificial Sequence
  synthetic circulating small noncoding RNA (sncRNA) 5' YRNA-derived fragment
cccccactgctaaatttgact

SEQ ID NO: 25375 - DNA, 31 bp, Artificial Sequence
  synthetic circulating small noncoding RNA (sncRNA) 5' YRNA-derived fragment
ggctggtccaaaggtagtgagttatctcaac

SEQ ID NO: 25376 - DNA, 22 bp, Artificial Sequence
  synthetic circulating small noncoding RNA (sncRNA) 5' YRNA-derived fragment
cactgcttcacttgactagcct

SEQ ID NO: 25377 - DNA, 27 bp, Artificial Sequence
  synthetic circulating small noncoding RNA (sncRNA) 5' YRNA-derived fragment
agttctgataacccactaccattgggc

SEQ ID NO: 25378 - DNA, 28 bp, Artificial Sequence
  synthetic circulating small noncoding RNA (sncRNA) 5' YRNA-derived fragment
tatacaaccccccactgctaaatttgac

SEQ ID NO: 25379 - DNA, 21 bp, Artificial Sequence
  synthetic circulating small noncoding RNA (sncRNA) 5' YRNA-derived fragment
gtcaagtgcagtagtgagaag

SEQ ID NO: 25380 - DNA, 27 bp, Artificial Sequence
  synthetic circulating small noncoding RNA (sncRNA) 5' YRNA-derived fragment
aagactagtcaagtgtagtagtgagaa

SEQ ID NO: 25381 - DNA, 23 bp, Artificial Sequence
  synthetic circulating small noncoding RNA (sncRNA) 5' YRNA-derived fragment
cagtaaaatttagcagtggggag

SEQ ID NO: 25382 - DNA, 28 bp, Artificial Sequence
  synthetic circulating small noncoding RNA (sncRNA) 5' YRNA-derived fragment
cttctcactactacacttgactagtctt

SEQ ID NO: 25383 - DNA, 34 bp, Artificial Sequence
  synthetic circulating small noncoding RNA (sncRNA) 5' YRNA-derived fragment
aaaggctagtcaagtgaagcagtgggagtggaga

SEQ ID NO: 25384 - DNA, 25 bp, Artificial Sequence
  synthetic circulating small noncoding RNA (sncRNA) 5' YRNA-derived fragment
agccagtcaaatttagcagttgggg

SEQ ID NO: 25385 - DNA, 33 bp, Artificial Sequence
  synthetic circulating small noncoding RNA (sncRNA) 5' YRNA-derived fragment
ctccactcccactgcttcacttgactagcctta

SEQ ID NO: 25386 - DNA, 28 bp, Artificial Sequence
  synthetic circulating small noncoding RNA (sncRNA) 5' YRNA-derived fragment
cccctcgctgctaaatttgactggcttt

SEQ ID NO: 25387 - DNA, 24 bp, Artificial Sequence
  synthetic circulating small noncoding RNA (sncRNA) 5' YRNA-derived fragment
ctcccactgcttcacttgactaga

SEQ ID NO: 25388 - DNA, 26 bp, Artificial Sequence
  synthetic circulating small noncoding RNA (sncRNA) 5' YRNA-derived fragment
agccagtcaaatttagcagtggggga

SEQ ID NO: 25389 - DNA, 23 bp, Artificial Sequence
  synthetic circulating small noncoding RNA (sncRNA) 5' YRNA-derived fragment
ctagtcaagtgaagcagtggggg

SEQ ID NO: 25390 - DNA, 29 bp, Artificial Sequence
  synthetic circulating small noncoding RNA (sncRNA) 5' YRNA-derived fragment
ggctggtccgatggtagtgatttatcaga

SEQ ID NO: 25391 - DNA, 32 bp, Artificial Sequence
  synthetic circulating small noncoding RNA (sncRNA) 5' YRNA-derived fragment
gctggtccgatggtagtgggttaccagaactt

SEQ ID NO: 25392 - DNA, 39 bp, Artificial Sequence
  synthetic circulating small noncoding RNA (sncRNA) 5' YRNA-derived fragment
agccagtcaaatttagcagtggggggttgtataccaact

SEQ ID NO: 25393 - DNA, 39 bp, Artificial Sequence
  synthetic circulating small noncoding RNA (sncRNA) 5' YRNA-derived fragment
ttgttccttctccactcccactgcttcacttaactagta

SEQ ID NO: 25394 - DNA, 34 bp, Artificial Sequence
  synthetic circulating small noncoding RNA (sncRNA) 5' YRNA-derived fragment
gagttcgatctgtaactgactgtgaacaatcaat

SEQ ID NO: 25395 - DNA, 25 bp, Artificial Sequence
  synthetic circulating small noncoding RNA (sncRNA) 5' YRNA-derived fragment
ctggtccgatggtagtgggttatca

SEQ ID NO: 25396 - DNA, 30 bp, Artificial Sequence
  synthetic circulating small noncoding RNA (sncRNA) 5' YRNA-derived fragment
ggctggtctgatggtagtgggttatcagag

SEQ ID NO: 25397 - DNA, 41 bp, Artificial Sequence
  synthetic circulating small noncoding RNA (sncRNA) 5' YRNA-derived fragment
cagccagtcaaatttagcagtggggggttgtataccaactt

SEQ ID NO: 25398 - DNA, 18 bp, Artificial Sequence
  synthetic circulating small noncoding RNA (sncRNA) 5' YRNA-derived fragment
actaccattggacaagcc

SEQ ID NO: 25399 - DNA, 26 bp, Artificial Sequence
  synthetic circulating small noncoding RNA (sncRNA) 5' YRNA-derived fragment
gataactcactacctttggaccagac

SEQ ID NO: 25400 - DNA, 23 bp, Artificial Sequence
  synthetic circulating small noncoding RNA (sncRNA) 5' YRNA-derived fragment
ctagtcaagtgcaatagtgagaa

SEQ ID NO: 25401 - DNA, 29 bp, Artificial Sequence
  synthetic circulating small noncoding RNA (sncRNA) 5' YRNA-derived fragment
tcccactgcttcacttgactagccttttg

SEQ ID NO: 25402 - DNA, 24 bp, Artificial Sequence
  synthetic circulating small noncoding RNA (sncRNA) 5' YRNA-derived fragment
acagtcaaatttagcagtggagag

SEQ ID NO: 25403 - DNA, 23 bp, Artificial Sequence
  synthetic circulating small noncoding RNA (sncRNA) 5' YRNA-derived fragment
gatagtagtgggttatcagaaca

SEQ ID NO: 25404 - DNA, 26 bp, Artificial Sequence
  synthetic circulating small noncoding RNA (sncRNA) 5' YRNA-derived fragment
gactagtcaagtgaagcagtgggagt

SEQ ID NO: 25405 - DNA, 34 bp, Artificial Sequence
  synthetic circulating small noncoding RNA (sncRNA) 5' YRNA-derived fragment
tatacaaccccccacaactaaatttgactggctt

SEQ ID NO: 25406 - DNA, 18 bp, Artificial Sequence
  synthetic circulating small noncoding RNA (sncRNA) 5' YRNA-derived fragment
actgctacatttgactgg

SEQ ID NO: 25407 - DNA, 35 bp, Artificial Sequence
  synthetic circulating small noncoding RNA (sncRNA) 5' YRNA-derived fragment
agttcgatctgtaactgactgtgaacaatcaattg

SEQ ID NO: 25408 - DNA, 22 bp, Artificial Sequence
  synthetic circulating small noncoding RNA (sncRNA) 5' YRNA-derived fragment
tatacaaccccccactgctaaa

SEQ ID NO: 25409 - DNA, 23 bp, Artificial Sequence
  synthetic circulating small noncoding RNA (sncRNA) 5' YRNA-derived fragment
ggctggtcctatggtagtgggtt

SEQ ID NO: 25410 - DNA, 18 bp, Artificial Sequence
  synthetic circulating small noncoding RNA (sncRNA) 5' YRNA-derived fragment
ctagtcaagtgaagcagt

SEQ ID NO: 25411 - DNA, 27 bp, Artificial Sequence
  synthetic circulating small noncoding RNA (sncRNA) 5' YRNA-derived fragment
aagccagttaaatttagcagtcagggg

SEQ ID NO: 25412 - DNA, 34 bp, Artificial Sequence
  synthetic circulating small noncoding RNA (sncRNA) 5' YRNA-derived fragment
ggctggtacaatggtagtgggttatcagaactta

SEQ ID NO: 25413 - DNA, 31 bp, Artificial Sequence
  synthetic circulating small noncoding RNA (sncRNA) 5' YRNA-derived fragment
gctggtccaatggtagtggtttatcagaact

SEQ ID NO: 25414 - DNA, 26 bp, Artificial Sequence
  synthetic circulating small noncoding RNA (sncRNA) 5' YRNA-derived fragment
ctccccccacaaccgcgcttgactag

SEQ ID NO: 25415 - DNA, 31 bp, Artificial Sequence
  synthetic circulating small noncoding RNA (sncRNA) 5' YRNA-derived fragment
gctggtacaatggtagtgggttatcagaact

SEQ ID NO: 25416 - DNA, 21 bp, Artificial Sequence
  synthetic circulating small noncoding RNA (sncRNA) 5' YRNA-derived fragment
taccaactttagtgacactaa

SEQ ID NO: 25417 - DNA, 27 bp, Artificial Sequence
  synthetic circulating small noncoding RNA (sncRNA) 5' YRNA-derived fragment
aagactagtcaagtgaagcagtgggag

SEQ ID NO: 25418 - DNA, 27 bp, Artificial Sequence
  synthetic circulating small noncoding RNA (sncRNA) 5' YRNA-derived fragment
gttctgataacccactaccatcgaacc

SEQ ID NO: 25419 - DNA, 27 bp, Artificial Sequence
  synthetic circulating small noncoding RNA (sncRNA) 5' YRNA-derived fragment
taagctagtcaagtgaagcagtgggag

SEQ ID NO: 25420 - DNA, 25 bp, Artificial Sequence
  synthetic circulating small noncoding RNA (sncRNA) 5' YRNA-derived fragment
ctttgttccttctccactcccactg

SEQ ID NO: 25421 - DNA, 22 bp, Artificial Sequence
  synthetic circulating small noncoding RNA (sncRNA) 5' YRNA-derived fragment
cactcctaaatttgcctggctt

SEQ ID NO: 25422 - DNA, 42 bp, Artificial Sequence
  synthetic circulating small noncoding RNA (sncRNA) 5' YRNA-derived fragment
agttggtccgagtgttgtgggttattgttaagttgatttaac

SEQ ID NO: 25423 - DNA, 18 bp, Artificial Sequence
  synthetic circulating small noncoding RNA (sncRNA) 5' YRNA-derived fragment
gtagtgggttatcagagc

SEQ ID NO: 25424 - DNA, 19 bp, Artificial Sequence
  synthetic circulating small noncoding RNA (sncRNA) 5' YRNA-derived fragment
cccactgctaaatttgact

SEQ ID NO: 25425 - DNA, 28 bp, Artificial Sequence
  synthetic circulating small noncoding RNA (sncRNA) 5' YRNA-derived fragment
ttagccagtcagattttagcagtggggg

SEQ ID NO: 25426 - DNA, 23 bp, Artificial Sequence
  synthetic circulating small noncoding RNA (sncRNA) 5' YRNA-derived fragment
gataacccactaccatcggacca

SEQ ID NO: 25427 - DNA, 21 bp, Artificial Sequence
  synthetic circulating small noncoding RNA (sncRNA) 5' YRNA-derived fragment
gtcaagtgaagcagtgggagt

SEQ ID NO: 25428 - DNA, 18 bp, Artificial Sequence
  synthetic circulating small noncoding RNA (sncRNA) 5' YRNA-derived fragment
tagtgggttatcggaact

SEQ ID NO: 25429 - DNA, 25 bp, Artificial Sequence
  synthetic circulating small noncoding RNA (sncRNA) 5' YRNA-derived fragment
tcccactgcttcacttggctagcct

SEQ ID NO: 25430 - DNA, 20 bp, Artificial Sequence
  synthetic circulating small noncoding RNA (sncRNA) 5' YRNA-derived fragment
actgcttcacttgactagtt

SEQ ID NO: 25431 - DNA, 19 bp, Artificial Sequence
  synthetic circulating small noncoding RNA (sncRNA) 5' YRNA-derived fragment
acattagtgtcactaacgt

SEQ ID NO: 25432 - DNA, 38 bp, Artificial Sequence
  synthetic circulating small noncoding RNA (sncRNA) 5' YRNA-derived fragment
attaataagttctgataacccactaccatcagaccagc

SEQ ID NO: 25433 - DNA, 24 bp, Artificial Sequence
  synthetic circulating small noncoding RNA (sncRNA) 5' YRNA-derived fragment
ttctcactactgcacttgactaga

SEQ ID NO: 25434 - DNA, 37 bp, Artificial Sequence
  synthetic circulating small noncoding RNA (sncRNA) 5' YRNA-derived fragment
tgataagttctgataacccactactatcggaccagcc

SEQ ID NO: 25435 - DNA, 29 bp, Artificial Sequence
  synthetic circulating small noncoding RNA (sncRNA) 5' YRNA-derived fragment
taagttctgataacccactaccatcggac

SEQ ID NO: 25436 - DNA, 24 bp, Artificial Sequence
  synthetic circulating small noncoding RNA (sncRNA) 5' YRNA-derived fragment
cgatggtagtgggttaccagaact

SEQ ID NO: 25437 - DNA, 21 bp, Artificial Sequence
  synthetic circulating small noncoding RNA (sncRNA) 5' YRNA-derived fragment
ttggtccgagtgttgtgggtt

SEQ ID NO: 25438 - DNA, 26 bp, Artificial Sequence
  synthetic circulating small noncoding RNA (sncRNA) 5' YRNA-derived fragment
gcccactgcttcacttgactagcctt

SEQ ID NO: 25439 - DNA, 19 bp, Artificial Sequence
  synthetic circulating small noncoding RNA (sncRNA) 5' YRNA-derived fragment
agttctgatagcccactac

SEQ ID NO: 25440 - DNA, 32 bp, Artificial Sequence
  synthetic circulating small noncoding RNA (sncRNA) 5' YRNA-derived fragment
agttgagataactcactaccttcagaccagcc

SEQ ID NO: 25441 - DNA, 31 bp, Artificial Sequence
  synthetic circulating small noncoding RNA (sncRNA) 5' YRNA-derived fragment
attcagataactcactaccttcagaccagtc

SEQ ID NO: 25442 - DNA, 45 bp, Artificial Sequence
  synthetic circulating small noncoding RNA (sncRNA) 5' YRNA-derived fragment
gactagtcaagtgcagtagtgagaaggggggaaagagtagaacaa

SEQ ID NO: 25443 - DNA, 22 bp, Artificial Sequence
  synthetic circulating small noncoding RNA (sncRNA) 5' YRNA-derived fragment
tagtgggttatcagaacttata

SEQ ID NO: 25444 - DNA, 28 bp, Artificial Sequence
  synthetic circulating small noncoding RNA (sncRNA) 5' YRNA-derived fragment
ggcttttccgatggtagtgggttatctg

SEQ ID NO: 25445 - DNA, 27 bp, Artificial Sequence
  synthetic circulating small noncoding RNA (sncRNA) 5' YRNA-derived fragment
cctcccactgctatatttgactggcta

SEQ ID NO: 25446 - DNA, 26 bp, Artificial Sequence
  synthetic circulating small noncoding RNA (sncRNA) 5' YRNA-derived fragment
cccccattgctaaattggactggatt

SEQ ID NO: 25447 - DNA, 25 bp, Artificial Sequence
  synthetic circulating small noncoding RNA (sncRNA) 5' YRNA-derived fragment
ttctcactactacacttgactagtc

SEQ ID NO: 25448 - DNA, 26 bp, Artificial Sequence
  synthetic circulating small noncoding RNA (sncRNA) 5' YRNA-derived fragment
ttctcactactacacttgactagtct

SEQ ID NO: 25449 - DNA, 31 bp, Artificial Sequence
  synthetic circulating small noncoding RNA (sncRNA) 5' YRNA-derived fragment
ggctgctctgatggtagtaggttatcagaac

SEQ ID NO: 25450 - DNA, 21 bp, Artificial Sequence
  synthetic circulating small noncoding RNA (sncRNA) 5' YRNA-derived fragment
ctggtccgaaggtagtgagtt

SEQ ID NO: 25451 - DNA, 19 bp, Artificial Sequence
  synthetic circulating small noncoding RNA (sncRNA) 5' YRNA-derived fragment
agttctgataaccaactac

SEQ ID NO: 25452 - DNA, 26 bp, Artificial Sequence
  synthetic circulating small noncoding RNA (sncRNA) 5' YRNA-derived fragment
caggctagtcaagtgaagcagtggga

SEQ ID NO: 25453 - DNA, 30 bp, Artificial Sequence
  synthetic circulating small noncoding RNA (sncRNA) 5' YRNA-derived fragment
ccgatggtagtgggttatcagaacttatta

SEQ ID NO: 25454 - DNA, 27 bp, Artificial Sequence
  synthetic circulating small noncoding RNA (sncRNA) 5' YRNA-derived fragment
ccccccattgctaaattggactggatt

SEQ ID NO: 25455 - DNA, 26 bp, Artificial Sequence
  synthetic circulating small noncoding RNA (sncRNA) 5' YRNA-derived fragment
tctgatggtagtgggttatcagagct

SEQ ID NO: 25456 - DNA, 32 bp, Artificial Sequence
  synthetic circulating small noncoding RNA (sncRNA) 5' YRNA-derived fragment
ggctggtctgaaggtagtgagttatctcaatt

SEQ ID NO: 25457 - DNA, 40 bp, Artificial Sequence
  synthetic circulating small noncoding RNA (sncRNA) 5' YRNA-derived fragment
tggctggtccgatggtagtgggttatcagaacttattaac

SEQ ID NO: 25458 - DNA, 35 bp, Artificial Sequence
  synthetic circulating small noncoding RNA (sncRNA) 5' YRNA-derived fragment
ctttccccccttctcactactgcacttgactagtc

SEQ ID NO: 25459 - DNA, 28 bp, Artificial Sequence
  synthetic circulating small noncoding RNA (sncRNA) 5' YRNA-derived fragment
ctccccgctgctaaatttggctggcttt

SEQ ID NO: 25460 - DNA, 27 bp, Artificial Sequence
  synthetic circulating small noncoding RNA (sncRNA) 5' YRNA-derived fragment
tggtccgatggtagtgggttatcagaa

SEQ ID NO: 25461 - DNA, 27 bp, Artificial Sequence
  synthetic circulating small noncoding RNA (sncRNA) 5' YRNA-derived fragment
agactagtaaagtgcagtagtgagaag

SEQ ID NO: 25462 - DNA, 20 bp, Artificial Sequence
  synthetic circulating small noncoding RNA (sncRNA) 5' YRNA-derived fragment
ggctggtccgagtgcagtgg

SEQ ID NO: 25463 - DNA, 30 bp, Artificial Sequence
  synthetic circulating small noncoding RNA (sncRNA) 5' YRNA-derived fragment
ctcccactgctaaatttgactggcttatta

SEQ ID NO: 25464 - DNA, 34 bp, Artificial Sequence
  synthetic circulating small noncoding RNA (sncRNA) 5' YRNA-derived fragment
acaattgagataactcactacctttggaccagcc

SEQ ID NO: 25465 - DNA, 28 bp, Artificial Sequence
  synthetic circulating small noncoding RNA (sncRNA) 5' YRNA-derived fragment
ggtccaatggtagtgggttatcagaact

SEQ ID NO: 25466 - DNA, 24 bp, Artificial Sequence
  synthetic circulating small noncoding RNA (sncRNA) 5' YRNA-derived fragment
agttctgataaccccctaccatgg

SEQ ID NO: 25467 - DNA, 23 bp, Artificial Sequence
  synthetic circulating small noncoding RNA (sncRNA) 5' YRNA-derived fragment
ggcttgtctgatggtagtgggtt

SEQ ID NO: 25468 - DNA, 28 bp, Artificial Sequence
  synthetic circulating small noncoding RNA (sncRNA) 5' YRNA-derived fragment
ctgataacctactaccatcggaccagcc

SEQ ID NO: 25469 - DNA, 24 bp, Artificial Sequence
  synthetic circulating small noncoding RNA (sncRNA) 5' YRNA-derived fragment
gtagtgggttatcagaacttatta

SEQ ID NO: 25470 - DNA, 23 bp, Artificial Sequence
  synthetic circulating small noncoding RNA (sncRNA) 5' YRNA-derived fragment
aaagccagtcaaatttagcagtg

SEQ ID NO: 25471 - DNA, 26 bp, Artificial Sequence
  synthetic circulating small noncoding RNA (sncRNA) 5' YRNA-derived fragment
gttacagatcgaactccttgttctac

SEQ ID NO: 25472 - DNA, 29 bp, Artificial Sequence
  synthetic circulating small noncoding RNA (sncRNA) 5' YRNA-derived fragment
ggtcctatggtagtgggttatcagaactt

SEQ ID NO: 25473 - DNA, 33 bp, Artificial Sequence
  synthetic circulating small noncoding RNA (sncRNA) 5' YRNA-derived fragment
tgctccactcccactgcttcacttgaccagcct

SEQ ID NO: 25474 - DNA, 37 bp, Artificial Sequence
  synthetic circulating small noncoding RNA (sncRNA) 5' YRNA-derived fragment
taataagttctgataacccactaccatcagaccagcc

SEQ ID NO: 25475 - DNA, 31 bp, Artificial Sequence
  synthetic circulating small noncoding RNA (sncRNA) 5' YRNA-derived fragment
ttctccactcccactgcttcacttgactaga

SEQ ID NO: 25476 - DNA, 34 bp, Artificial Sequence
  synthetic circulating small noncoding RNA (sncRNA) 5' YRNA-derived fragment
tgctagtctgatggtagtgggttatcagaactta

SEQ ID NO: 25477 - DNA, 28 bp, Artificial Sequence
  synthetic circulating small noncoding RNA (sncRNA) 5' YRNA-derived fragment
attcccactgcttcacttgactagcctt

SEQ ID NO: 25478 - DNA, 36 bp, Artificial Sequence
  synthetic circulating small noncoding RNA (sncRNA) 5' YRNA-derived fragment
ggctggtccaatgatagtgggttatcagaacttatt

SEQ ID NO: 25479 - DNA, 29 bp, Artificial Sequence
  synthetic circulating small noncoding RNA (sncRNA) 5' YRNA-derived fragment
ggctggtctgatggtagtgggttatcaga

SEQ ID NO: 25480 - DNA, 22 bp, Artificial Sequence
  synthetic circulating small noncoding RNA (sncRNA) 5' YRNA-derived fragment
aagacagtcaaatttagcagtg

SEQ ID NO: 25481 - DNA, 22 bp, Artificial Sequence
  synthetic circulating small noncoding RNA (sncRNA) 5' YRNA-derived fragment
ctagtcaagtgacgcagtggga

SEQ ID NO: 25482 - DNA, 35 bp, Artificial Sequence
  synthetic circulating small noncoding RNA (sncRNA) 5' YRNA-derived fragment
tccttctccattcccactgcttcacttgactagtt

SEQ ID NO: 25483 - DNA, 32 bp, Artificial Sequence
  synthetic circulating small noncoding RNA (sncRNA) 5' YRNA-derived fragment
accagtcaaatttagcagtggggggttgtata

SEQ ID NO: 25484 - DNA, 30 bp, Artificial Sequence
  synthetic circulating small noncoding RNA (sncRNA) 5' YRNA-derived fragment
tccccccacaaccgcgcttgactagcttgc

SEQ ID NO: 25485 - DNA, 35 bp, Artificial Sequence
  synthetic circulating small noncoding RNA (sncRNA) 5' YRNA-derived fragment
ttatcagaacttattaacattagtgtcactaaagt

SEQ ID NO: 25486 - DNA, 31 bp, Artificial Sequence
  synthetic circulating small noncoding RNA (sncRNA) 5' YRNA-derived fragment
ccccccttctcactactgcacttgactaaaa

SEQ ID NO: 25487 - DNA, 21 bp, Artificial Sequence
  synthetic circulating small noncoding RNA (sncRNA) 5' YRNA-derived fragment
gttgtgggttattgttaagtt

SEQ ID NO: 25488 - DNA, 27 bp, Artificial Sequence
  synthetic circulating small noncoding RNA (sncRNA) 5' YRNA-derived fragment
tcccactgcttcacttgactagcctta

SEQ ID NO: 25489 - DNA, 18 bp, Artificial Sequence
  synthetic circulating small noncoding RNA (sncRNA) 5' YRNA-derived fragment
acttctgattacccacta

SEQ ID NO: 25490 - DNA, 28 bp, Artificial Sequence
  synthetic circulating small noncoding RNA (sncRNA) 5' YRNA-derived fragment
ggtccgatggtagcgggttatcagaacc

SEQ ID NO: 25491 - DNA, 31 bp, Artificial Sequence
  synthetic circulating small noncoding RNA (sncRNA) 5' YRNA-derived fragment
aataagttctgataacccactaccatcggac

SEQ ID NO: 25492 - DNA, 28 bp, Artificial Sequence
  synthetic circulating small noncoding RNA (sncRNA) 5' YRNA-derived fragment
aagccagtcaaatttagcagtggggggc

SEQ ID NO: 25493 - DNA, 32 bp, Artificial Sequence
  synthetic circulating small noncoding RNA (sncRNA) 5' YRNA-derived fragment
ctccactcccactgcttcacttgactagccta

SEQ ID NO: 25494 - DNA, 32 bp, Artificial Sequence
  synthetic circulating small noncoding RNA (sncRNA) 5' YRNA-derived fragment
cattagtgtcactaaagttggtatacagccct

SEQ ID NO: 25495 - DNA, 32 bp, Artificial Sequence
  synthetic circulating small noncoding RNA (sncRNA) 5' YRNA-derived fragment
aattcagataactcactaccttcagaccagtc

SEQ ID NO: 25496 - DNA, 47 bp, Artificial Sequence
  synthetic circulating small noncoding RNA (sncRNA) 5' YRNA-derived fragment
cagatttctttgttccttctccactcccactgcttcacttgactaga

SEQ ID NO: 25497 - DNA, 31 bp, Artificial Sequence
  synthetic circulating small noncoding RNA (sncRNA) 5' YRNA-derived fragment
attgagataactcactacctttgggccagcc

SEQ ID NO: 25498 - DNA, 29 bp, Artificial Sequence
  synthetic circulating small noncoding RNA (sncRNA) 5' YRNA-derived fragment
tatacaaccccccactgctaaatttgact

SEQ ID NO: 25499 - DNA, 19 bp, Artificial Sequence
  synthetic circulating small noncoding RNA (sncRNA) 5' YRNA-derived fragment
tccttctccactcccactg

SEQ ID NO: 25500 - DNA, 31 bp, Artificial Sequence
  synthetic circulating small noncoding RNA (sncRNA) 5' YRNA-derived fragment
taaaggctagtcaagtgaagcagtgggagtg

SEQ ID NO: 25501 - DNA, 37 bp, Artificial Sequence
  synthetic circulating small noncoding RNA (sncRNA) 5' YRNA-derived fragment
taataagttctgataacccactaccattggaccaacc

SEQ ID NO: 25502 - DNA, 21 bp, Artificial Sequence
  synthetic circulating small noncoding RNA (sncRNA) 5' YRNA-derived fragment
accgcgcttgactagcttgct

SEQ ID NO: 25503 - DNA, 37 bp, Artificial Sequence
  synthetic circulating small noncoding RNA (sncRNA) 5' YRNA-derived fragment
ggtccgatggtagtgggttatcagaacttattaacat

SEQ ID NO: 25504 - DNA, 37 bp, Artificial Sequence
  synthetic circulating small noncoding RNA (sncRNA) 5' YRNA-derived fragment
tgctagtctgatggtagtgggttatcagaacttatta

SEQ ID NO: 25505 - DNA, 30 bp, Artificial Sequence
  synthetic circulating small noncoding RNA (sncRNA) 5' YRNA-derived fragment
gctggtctgatggtagtgggttatcaggac

SEQ ID NO: 25506 - DNA, 36 bp, Artificial Sequence
  synthetic circulating small noncoding RNA (sncRNA) 5' YRNA-derived fragment
ggtccgagtgttgtgggttattgttaagttgattta

SEQ ID NO: 25507 - DNA, 32 bp, Artificial Sequence
  synthetic circulating small noncoding RNA (sncRNA) 5' YRNA-derived fragment
agttctgatagcccactaccatcaaaccagcc

SEQ ID NO: 25508 - DNA, 24 bp, Artificial Sequence
  synthetic circulating small noncoding RNA (sncRNA) 5' YRNA-derived fragment
tcccactgcttcacttgactagtt

SEQ ID NO: 25509 - DNA, 40 bp, Artificial Sequence
  synthetic circulating small noncoding RNA (sncRNA) 5' YRNA-derived fragment
atttaacattgtctccccccacaaccgcgcttgactagct

SEQ ID NO: 25510 - DNA, 27 bp, Artificial Sequence
  synthetic circulating small noncoding RNA (sncRNA) 5' YRNA-derived fragment
cccactgcttcacttgactagcctttt

SEQ ID NO: 25511 - DNA, 42 bp, Artificial Sequence
  synthetic circulating small noncoding RNA (sncRNA) 5' YRNA-derived fragment
tctttgttccttctccactcccactgcttcacttgactagcc

SEQ ID NO: 25512 - DNA, 26 bp, Artificial Sequence
  synthetic circulating small noncoding RNA (sncRNA) 5' YRNA-derived fragment
agccagtcaaatttagcagttggggg

SEQ ID NO: 25513 - DNA, 28 bp, Artificial Sequence
  synthetic circulating small noncoding RNA (sncRNA) 5' YRNA-derived fragment
cggaacttattaacattagtgtcactaa

SEQ ID NO: 25514 - DNA, 36 bp, Artificial Sequence
  synthetic circulating small noncoding RNA (sncRNA) 5' YRNA-derived fragment
aggctagtcaagtgaagcagtgggagtggagaagga

SEQ ID NO: 25515 - DNA, 23 bp, Artificial Sequence
  synthetic circulating small noncoding RNA (sncRNA) 5' YRNA-derived fragment
cggctggtccgagtgcagtggtg

SEQ ID NO: 25516 - DNA, 20 bp, Artificial Sequence
  synthetic circulating small noncoding RNA (sncRNA) 5' YRNA-derived fragment
ccactgcttcacttgactag

SEQ ID NO: 25517 - DNA, 45 bp, Artificial Sequence
  synthetic circulating small noncoding RNA (sncRNA) 5' YRNA-derived fragment
gatttctttgttccttctccactcccactgcttcacttgactagc

SEQ ID NO: 25518 - DNA, 28 bp, Artificial Sequence
  synthetic circulating small noncoding RNA (sncRNA) 5' YRNA-derived fragment
accagtcaaatttagcagtggggggttg

SEQ ID NO: 25519 - DNA, 20 bp, Artificial Sequence
  synthetic circulating small noncoding RNA (sncRNA) 5' YRNA-derived fragment
tcactaccttcggaccagcc

SEQ ID NO: 25520 - DNA, 24 bp, Artificial Sequence
  synthetic circulating small noncoding RNA (sncRNA) 5' YRNA-derived fragment
ctggtccgaaggtagtgagttatc

SEQ ID NO: 25521 - DNA, 35 bp, Artificial Sequence
  synthetic circulating small noncoding RNA (sncRNA) 5' YRNA-derived fragment
ataagttctgataacccactaccattggacaagcc

SEQ ID NO: 25522 - DNA, 44 bp, Artificial Sequence
  synthetic circulating small noncoding RNA (sncRNA) 5' YRNA-derived fragment
gactagtcaagtgcagtagtgagaaggggggaaagagtagaaca

SEQ ID NO: 25523 - DNA, 27 bp, Artificial Sequence
  synthetic circulating small noncoding RNA (sncRNA) 5' YRNA-derived fragment
cccccaactgctaaatatgagtggctt

SEQ ID NO: 25524 - DNA, 33 bp, Artificial Sequence
  synthetic circulating small noncoding RNA (sncRNA) 5' YRNA-derived fragment
aattgagataactcactaccttcggaccagcca

SEQ ID NO: 25525 - DNA, 24 bp, Artificial Sequence
  synthetic circulating small noncoding RNA (sncRNA) 5' YRNA-derived fragment
cggctggtccgagtgcagtggtgt

SEQ ID NO: 25526 - DNA, 31 bp, Artificial Sequence
  synthetic circulating small noncoding RNA (sncRNA) 5' YRNA-derived fragment
ggctggtccaaaggcagtgagttatctcaat

SEQ ID NO: 25527 - DNA, 30 bp, Artificial Sequence
  synthetic circulating small noncoding RNA (sncRNA) 5' YRNA-derived fragment
ttgagataactcactaccttcagaccagcc

SEQ ID NO: 25528 - DNA, 33 bp, Artificial Sequence
  synthetic circulating small noncoding RNA (sncRNA) 5' YRNA-derived fragment
actagtcaagtgaagcagtgggagtggagaagg

SEQ ID NO: 25529 - DNA, 21 bp, Artificial Sequence
  synthetic circulating small noncoding RNA (sncRNA) 5' YRNA-derived fragment
tacaaccccccactgctaaat

SEQ ID NO: 25530 - DNA, 19 bp, Artificial Sequence
  synthetic circulating small noncoding RNA (sncRNA) 5' YRNA-derived fragment
tcccactgcttcacttgac

SEQ ID NO: 25531 - DNA, 22 bp, Artificial Sequence
  synthetic circulating small noncoding RNA (sncRNA) 5' YRNA-derived fragment
ctaggcaagtgaagcagtggga

SEQ ID NO: 25532 - DNA, 28 bp, Artificial Sequence
  synthetic circulating small noncoding RNA (sncRNA) 5' YRNA-derived fragment
ggctggtccgatggtagtgggttaccag

SEQ ID NO: 25533 - DNA, 32 bp, Artificial Sequence
  synthetic circulating small noncoding RNA (sncRNA) 5' YRNA-derived fragment
caaccccccactgctaaatttgactggcttta

SEQ ID NO: 25534 - DNA, 34 bp, Artificial Sequence
  synthetic circulating small noncoding RNA (sncRNA) 5' YRNA-derived fragment
taagttctgataacccactaccattgggccagcc

SEQ ID NO: 25535 - DNA, 18 bp, Artificial Sequence
  synthetic circulating small noncoding RNA (sncRNA) 5' YRNA-derived fragment
actaccttcggacgagcc

SEQ ID NO: 25536 - DNA, 30 bp, Artificial Sequence
  synthetic circulating small noncoding RNA (sncRNA) 5' YRNA-derived fragment
gatggtagtgggttatcagaacttattaac

SEQ ID NO: 25537 - DNA, 32 bp, Artificial Sequence
  synthetic circulating small noncoding RNA (sncRNA) 5' YRNA-derived fragment
ggctggtccaaaggtagtgagttatcccaact

SEQ ID NO: 25538 - DNA, 19 bp, Artificial Sequence
  synthetic circulating small noncoding RNA (sncRNA) 5' YRNA-derived fragment
accagtcaaatttagcagt

SEQ ID NO: 25539 - DNA, 32 bp, Artificial Sequence
  synthetic circulating small noncoding RNA (sncRNA) 5' YRNA-derived fragment
gctggtcagatggtagtgggttatcagaactt

SEQ ID NO: 25540 - DNA, 30 bp, Artificial Sequence
  synthetic circulating small noncoding RNA (sncRNA) 5' YRNA-derived fragment
gttgtaaactccactgcactcggaccagca

SEQ ID NO: 25541 - DNA, 23 bp, Artificial Sequence
  synthetic circulating small noncoding RNA (sncRNA) 5' YRNA-derived fragment
gatggtagtgggttatcagagct

SEQ ID NO: 25542 - DNA, 22 bp, Artificial Sequence
  synthetic circulating small noncoding RNA (sncRNA) 5' YRNA-derived fragment
aagccagtcaaatttagcggtg

SEQ ID NO: 25543 - DNA, 21 bp, Artificial Sequence
  synthetic circulating small noncoding RNA (sncRNA) 5' YRNA-derived fragment
tagtcaagtgaagcagtggga

SEQ ID NO: 25544 - DNA, 27 bp, Artificial Sequence
  synthetic circulating small noncoding RNA (sncRNA) 5' YRNA-derived fragment
aatccagtgaaatttagcaatgggggg

SEQ ID NO: 25545 - DNA, 22 bp, Artificial Sequence
  synthetic circulating small noncoding RNA (sncRNA) 5' YRNA-derived fragment
cagtcagattttagcagtgggg

SEQ ID NO: 25546 - DNA, 30 bp, Artificial Sequence
  synthetic circulating small noncoding RNA (sncRNA) 5' YRNA-derived fragment
ttctcactactgcacttgactagtcttttt

SEQ ID NO: 25547 - DNA, 34 bp, Artificial Sequence
  synthetic circulating small noncoding RNA (sncRNA) 5' YRNA-derived fragment
cagttggtccgagtgttgtgggttattgttaagt

SEQ ID NO: 25548 - DNA, 30 bp, Artificial Sequence
  synthetic circulating small noncoding RNA (sncRNA) 5' YRNA-derived fragment
ggctggtacaatggtagtgggttatcagaa

SEQ ID NO: 25549 - DNA, 39 bp, Artificial Sequence
  synthetic circulating small noncoding RNA (sncRNA) 5' YRNA-derived fragment
gttaataaattctgataacccactaccatcagaccagcc

SEQ ID NO: 25550 - DNA, 31 bp, Artificial Sequence
  synthetic circulating small noncoding RNA (sncRNA) 5' YRNA-derived fragment
aaggctagtcaagtgaagcagtgggagtgga

SEQ ID NO: 25551 - DNA, 30 bp, Artificial Sequence
  synthetic circulating small noncoding RNA (sncRNA) 5' YRNA-derived fragment
gagttctgataacccactaccatcggacca

SEQ ID NO: 25552 - DNA, 26 bp, Artificial Sequence
  synthetic circulating small noncoding RNA (sncRNA) 5' YRNA-derived fragment
gagtgttgtgggttattgttaagttg

SEQ ID NO: 25553 - DNA, 35 bp, Artificial Sequence
  synthetic circulating small noncoding RNA (sncRNA) 5' YRNA-derived fragment
ggctggtccaatggtagtggtttatcagaacttat

SEQ ID NO: 25554 - DNA, 28 bp, Artificial Sequence
  synthetic circulating small noncoding RNA (sncRNA) 5' YRNA-derived fragment
ctccactcccactgcttcacttgactag

SEQ ID NO: 25555 - DNA, 29 bp, Artificial Sequence
  synthetic circulating small noncoding RNA (sncRNA) 5' YRNA-derived fragment
tccactcccactgcttcacttgactagcc

SEQ ID NO: 25556 - DNA, 23 bp, Artificial Sequence
  synthetic circulating small noncoding RNA (sncRNA) 5' YRNA-derived fragment
actttagtgacactaatgttaat

SEQ ID NO: 25557 - DNA, 32 bp, Artificial Sequence
  synthetic circulating small noncoding RNA (sncRNA) 5' YRNA-derived fragment
tcactaaagttggtatacaaccccccactgct

SEQ ID NO: 25558 - DNA, 26 bp, Artificial Sequence
  synthetic circulating small noncoding RNA (sncRNA) 5' YRNA-derived fragment
ccccccattgctaaatttgactggct

SEQ ID NO: 25559 - DNA, 32 bp, Artificial Sequence
  synthetic circulating small noncoding RNA (sncRNA) 5' YRNA-derived fragment
ggctggtccaaaggtagtgagttatctcaact

SEQ ID NO: 25560 - DNA, 25 bp, Artificial Sequence
  synthetic circulating small noncoding RNA (sncRNA) 5' YRNA-derived fragment
ccactgcttcacttgactagcctta

SEQ ID NO: 25561 - DNA, 24 bp, Artificial Sequence
  synthetic circulating small noncoding RNA (sncRNA) 5' YRNA-derived fragment
tagccagtcagattttagcagtgg

SEQ ID NO: 25562 - DNA, 24 bp, Artificial Sequence
  synthetic circulating small noncoding RNA (sncRNA) 5' YRNA-derived fragment
agttctgataacccaccaccatgg

SEQ ID NO: 25563 - DNA, 31 bp, Artificial Sequence
  synthetic circulating small noncoding RNA (sncRNA) 5' YRNA-derived fragment
gctggtctgatggtagtgggttatcagaact

SEQ ID NO: 25564 - DNA, 23 bp, Artificial Sequence
  synthetic circulating small noncoding RNA (sncRNA) 5' YRNA-derived fragment
aagccattcaaatttagcagtgg

SEQ ID NO: 25565 - DNA, 27 bp, Artificial Sequence
  synthetic circulating small noncoding RNA (sncRNA) 5' YRNA-derived fragment
gttcgatggcagtgggttatcagaact

SEQ ID NO: 25566 - DNA, 28 bp, Artificial Sequence
  synthetic circulating small noncoding RNA (sncRNA) 5' YRNA-derived fragment
ctcccactgctaaatttgactggcttat

SEQ ID NO: 25567 - DNA, 32 bp, Artificial Sequence
  synthetic circulating small noncoding RNA (sncRNA) 5' YRNA-derived fragment
ttccccccttctcactactgcacttgactagt

SEQ ID NO: 25568 - DNA, 19 bp, Artificial Sequence
  synthetic circulating small noncoding RNA (sncRNA) 5' YRNA-derived fragment
gtagcgggttatcagaacc

SEQ ID NO: 25569 - DNA, 31 bp, Artificial Sequence
  synthetic circulating small noncoding RNA (sncRNA) 5' YRNA-derived fragment
ttaaaagccagtcaaatttagcagtgggggg

SEQ ID NO: 25570 - DNA, 38 bp, Artificial Sequence
  synthetic circulating small noncoding RNA (sncRNA) 5' YRNA-derived fragment
ttaatgagttctgataacccactaccatcggaccagcc

SEQ ID NO: 25571 - DNA, 29 bp, Artificial Sequence
  synthetic circulating small noncoding RNA (sncRNA) 5' YRNA-derived fragment
taagactagtcaagtgcagtagtgagaag

SEQ ID NO: 25572 - DNA, 19 bp, Artificial Sequence
  synthetic circulating small noncoding RNA (sncRNA) 5' YRNA-derived fragment
acgttagtgacactaatgt

SEQ ID NO: 25573 - DNA, 27 bp, Artificial Sequence
  synthetic circulating small noncoding RNA (sncRNA) 5' YRNA-derived fragment
aagcctagtcaagtgaagcagtgggag

SEQ ID NO: 25574 - DNA, 28 bp, Artificial Sequence
  synthetic circulating small noncoding RNA (sncRNA) 5' YRNA-derived fragment
gagataacccactaccttcggacgagcc

SEQ ID NO: 25575 - DNA, 27 bp, Artificial Sequence
  synthetic circulating small noncoding RNA (sncRNA) 5' YRNA-derived fragment
ggcttgtctgatggtagtgggttatca

SEQ ID NO: 25576 - DNA, 28 bp, Artificial Sequence
  synthetic circulating small noncoding RNA (sncRNA) 5' YRNA-derived fragment
ttctcactactgcacttgactagtcttt

SEQ ID NO: 25577 - DNA, 28 bp, Artificial Sequence
  synthetic circulating small noncoding RNA (sncRNA) 5' YRNA-derived fragment
tccccccacaaccgcgcttgactagctt

SEQ ID NO: 25578 - DNA, 23 bp, Artificial Sequence
  synthetic circulating small noncoding RNA (sncRNA) 5' YRNA-derived fragment
cagtgggagtggagaaggaaaca

SEQ ID NO: 25579 - DNA, 26 bp, Artificial Sequence
  synthetic circulating small noncoding RNA (sncRNA) 5' YRNA-derived fragment
taagttctgataacccactaccatcg

SEQ ID NO: 25580 - DNA, 27 bp, Artificial Sequence
  synthetic circulating small noncoding RNA (sncRNA) 5' YRNA-derived fragment
ctcccactgcttcacttgactagactt

SEQ ID NO: 25581 - DNA, 18 bp, Artificial Sequence
  synthetic circulating small noncoding RNA (sncRNA) 5' YRNA-derived fragment
aaagccagtcaaatttag

SEQ ID NO: 25582 - DNA, 44 bp, Artificial Sequence
  synthetic circulating small noncoding RNA (sncRNA) 5' YRNA-derived fragment
ctttgttccttctccactcccactgcttcacttgactagccttt

SEQ ID NO: 25583 - DNA, 34 bp, Artificial Sequence
  synthetic circulating small noncoding RNA (sncRNA) 5' YRNA-derived fragment
ttggtatacaaccccccactgctaaatttgactg

SEQ ID NO: 25584 - DNA, 26 bp, Artificial Sequence
  synthetic circulating small noncoding RNA (sncRNA) 5' YRNA-derived fragment
ggctggtccgagtgcagtggtgtttg

SEQ ID NO: 25585 - DNA, 34 bp, Artificial Sequence
  synthetic circulating small noncoding RNA (sncRNA) 5' YRNA-derived fragment
tatcagaacttattaacattagtgtcactaaagt

SEQ ID NO: 25586 - DNA, 23 bp, Artificial Sequence
  synthetic circulating small noncoding RNA (sncRNA) 5' YRNA-derived fragment
gtagtgggttatcagaacttata

SEQ ID NO: 25587 - DNA, 18 bp, Artificial Sequence
  synthetic circulating small noncoding RNA (sncRNA) 5' YRNA-derived fragment
aagccagtcaaatttaac

SEQ ID NO: 25588 - DNA, 43 bp, Artificial Sequence
  synthetic circulating small noncoding RNA (sncRNA) 5' YRNA-derived fragment
tctttgttccttctccactcccactgcttcacttgactagcct

SEQ ID NO: 25589 - DNA, 25 bp, Artificial Sequence
  synthetic circulating small noncoding RNA (sncRNA) 5' YRNA-derived fragment
aaagccagtcaaatttagcagtggg

SEQ ID NO: 25590 - DNA, 34 bp, Artificial Sequence
  synthetic circulating small noncoding RNA (sncRNA) 5' YRNA-derived fragment
aggctagtcaagtgaagcagtgggagtggagaag

SEQ ID NO: 25591 - DNA, 29 bp, Artificial Sequence
  synthetic circulating small noncoding RNA (sncRNA) 5' YRNA-derived fragment
caaagctagtcaagcgtggttgtgggggg

SEQ ID NO: 25592 - DNA, 24 bp, Artificial Sequence
  synthetic circulating small noncoding RNA (sncRNA) 5' YRNA-derived fragment
taataagttctgataacccactac

SEQ ID NO: 25593 - DNA, 23 bp, Artificial Sequence
  synthetic circulating small noncoding RNA (sncRNA) 5' YRNA-derived fragment
ggctggtcagatggtagtgggtt

SEQ ID NO: 25594 - DNA, 33 bp, Artificial Sequence
  synthetic circulating small noncoding RNA (sncRNA) 5' YRNA-derived fragment
tccactcccactgcttcacttgactagcctttt

SEQ ID NO: 25595 - DNA, 34 bp, Artificial Sequence
  synthetic circulating small noncoding RNA (sncRNA) 5' YRNA-derived fragment
taagttctgataacccactaccatcagaccagct

SEQ ID NO: 25596 - DNA, 28 bp, Artificial Sequence
  synthetic circulating small noncoding RNA (sncRNA) 5' YRNA-derived fragment
agttctgataacccactaccattggacc

SEQ ID NO: 25597 - DNA, 23 bp, Artificial Sequence
  synthetic circulating small noncoding RNA (sncRNA) 5' YRNA-derived fragment
aacccactaccatccgacaagcc

SEQ ID NO: 25598 - DNA, 27 bp, Artificial Sequence
  synthetic circulating small noncoding RNA (sncRNA) 5' YRNA-derived fragment
ctcccactgctaaatttgactggctta

SEQ ID NO: 25599 - DNA, 26 bp, Artificial Sequence
  synthetic circulating small noncoding RNA (sncRNA) 5' YRNA-derived fragment
gataacccactaccttcggacgagcc

SEQ ID NO: 25600 - DNA, 29 bp, Artificial Sequence
  synthetic circulating small noncoding RNA (sncRNA) 5' YRNA-derived fragment
actagtcaagtgtagtagtgagaaggggg

SEQ ID NO: 25601 - DNA, 30 bp, Artificial Sequence
  synthetic circulating small noncoding RNA (sncRNA) 5' YRNA-derived fragment
agccagtcaaatttagcagtggggggttgt

SEQ ID NO: 25602 - DNA, 23 bp, Artificial Sequence
  synthetic circulating small noncoding RNA (sncRNA) 5' YRNA-derived fragment
tcactactgcacttgactagtct

SEQ ID NO: 25603 - DNA, 26 bp, Artificial Sequence
  synthetic circulating small noncoding RNA (sncRNA) 5' YRNA-derived fragment
gtagtgggttatcagaacttattaac

SEQ ID NO: 25604 - DNA, 22 bp, Artificial Sequence
  synthetic circulating small noncoding RNA (sncRNA) 5' YRNA-derived fragment
aataagttctgataacccacca

SEQ ID NO: 25605 - DNA, 33 bp, Artificial Sequence
  synthetic circulating small noncoding RNA (sncRNA) 5' YRNA-derived fragment
aagttctgataacccactaccatcagaccagct

SEQ ID NO: 25606 - DNA, 32 bp, Artificial Sequence
  synthetic circulating small noncoding RNA (sncRNA) 5' YRNA-derived fragment
actttagtgacactaatgttaataagttctga

SEQ ID NO: 25607 - DNA, 28 bp, Artificial Sequence
  synthetic circulating small noncoding RNA (sncRNA) 5' YRNA-derived fragment
ggtctgatggtagtgggttatcagaact

SEQ ID NO: 25608 - DNA, 26 bp, Artificial Sequence
  synthetic circulating small noncoding RNA (sncRNA) 5' YRNA-derived fragment
aaactagtcaagtgcagtagtgagaa

SEQ ID NO: 25609 - DNA, 19 bp, Artificial Sequence
  synthetic circulating small noncoding RNA (sncRNA) 5' YRNA-derived fragment
cactaccatcggaccagtc

SEQ ID NO: 25610 - DNA, 35 bp, Artificial Sequence
  synthetic circulating small noncoding RNA (sncRNA) 5' YRNA-derived fragment
gactagtcaagtgaagcagtgggagtggagaagga

SEQ ID NO: 25611 - DNA, 31 bp, Artificial Sequence
  synthetic circulating small noncoding RNA (sncRNA) 5' YRNA-derived fragment
gttctgagaacccaataccatcagaccagct

SEQ ID NO: 25612 - DNA, 41 bp, Artificial Sequence
  synthetic circulating small noncoding RNA (sncRNA) 5' YRNA-derived fragment
acattaataagttctgataacccactaccatcgaaccagcc

SEQ ID NO: 25613 - DNA, 37 bp, Artificial Sequence
  synthetic circulating small noncoding RNA (sncRNA) 5' YRNA-derived fragment
ttctccactcccactgcttcacttgactagcctaaaa

SEQ ID NO: 25614 - DNA, 19 bp, Artificial Sequence
  synthetic circulating small noncoding RNA (sncRNA) 5' YRNA-derived fragment
gcttcacttgactagcctt

SEQ ID NO: 25615 - DNA, 22 bp, Artificial Sequence
  synthetic circulating small noncoding RNA (sncRNA) 5' YRNA-derived fragment
acagtcagttacagatcgaact

SEQ ID NO: 25616 - DNA, 38 bp, Artificial Sequence
  synthetic circulating small noncoding RNA (sncRNA) 5' YRNA-derived fragment
ttccttctccactcccactgcttcacttgactagcctt

SEQ ID NO: 25617 - DNA, 30 bp, Artificial Sequence
  synthetic circulating small noncoding RNA (sncRNA) 5' YRNA-derived fragment
atacaaccccccactgctaaatttgactgg

SEQ ID NO: 25618 - DNA, 25 bp, Artificial Sequence
  synthetic circulating small noncoding RNA (sncRNA) 5' YRNA-derived fragment
ataacccactaccatccgacaagcc

SEQ ID NO: 25619 - DNA, 25 bp, Artificial Sequence
  synthetic circulating small noncoding RNA (sncRNA) 5' YRNA-derived fragment
acaacccactaccatcggaccagcc

SEQ ID NO: 25620 - DNA, 29 bp, Artificial Sequence
  synthetic circulating small noncoding RNA (sncRNA) 5' YRNA-derived fragment
cccccactgctaaatttgactggctttta

SEQ ID NO: 25621 - DNA, 21 bp, Artificial Sequence
  synthetic circulating small noncoding RNA (sncRNA) 5' YRNA-derived fragment
aaagccagtcaaatttagcag

SEQ ID NO: 25622 - DNA, 31 bp, Artificial Sequence
  synthetic circulating small noncoding RNA (sncRNA) 5' YRNA-derived fragment
gctggtccgatggtagtgatttatcagaact

SEQ ID NO: 25623 - DNA, 20 bp, Artificial Sequence
  synthetic circulating small noncoding RNA (sncRNA) 5' YRNA-derived fragment
tcaaatttagcagtgggggg

SEQ ID NO: 25624 - DNA, 35 bp, Artificial Sequence
  synthetic circulating small noncoding RNA (sncRNA) 5' YRNA-derived fragment
ggctggtcagaaggtagtgagttatctcaattgtt

SEQ ID NO: 25625 - DNA, 25 bp, Artificial Sequence
  synthetic circulating small noncoding RNA (sncRNA) 5' YRNA-derived fragment
agttctgataaccccctaccatggg

SEQ ID NO: 25626 - DNA, 45 bp, Artificial Sequence
  synthetic circulating small noncoding RNA (sncRNA) 5' YRNA-derived fragment
actagtcaagtgcagtagtgagaaggggggaaagagtagaacaag

SEQ ID NO: 25627 - DNA, 20 bp, Artificial Sequence
  synthetic circulating small noncoding RNA (sncRNA) 5' YRNA-derived fragment
aagccagtcacatttagcag

SEQ ID NO: 25628 - DNA, 27 bp, Artificial Sequence
  synthetic circulating small noncoding RNA (sncRNA) 5' YRNA-derived fragment
taaggctagtcaagtgaagcagtggga

SEQ ID NO: 25629 - DNA, 27 bp, Artificial Sequence
  synthetic circulating small noncoding RNA (sncRNA) 5' YRNA-derived fragment
aaaggctagtcaagtgaagcagtggga

SEQ ID NO: 25630 - DNA, 26 bp, Artificial Sequence
  synthetic circulating small noncoding RNA (sncRNA) 5' YRNA-derived fragment
gccagtcagattttagcagtgggggg

SEQ ID NO: 25631 - DNA, 22 bp, Artificial Sequence
  synthetic circulating small noncoding RNA (sncRNA) 5' YRNA-derived fragment
tgccactgcttcacctgactag

SEQ ID NO: 25632 - DNA, 27 bp, Artificial Sequence
  synthetic circulating small noncoding RNA (sncRNA) 5' YRNA-derived fragment
ctgacaacccactaccatcggaccagc

SEQ ID NO: 25633 - DNA, 21 bp, Artificial Sequence
  synthetic circulating small noncoding RNA (sncRNA) 5' YRNA-derived fragment
cgctgctaaatttgactggct

SEQ ID NO: 25634 - DNA, 43 bp, Artificial Sequence
  synthetic circulating small noncoding RNA (sncRNA) 5' YRNA-derived fragment
taaagttggtatacaaccccccattgctaaatttgactggctt

SEQ ID NO: 25635 - DNA, 26 bp, Artificial Sequence
  synthetic circulating small noncoding RNA (sncRNA) 5' YRNA-derived fragment
gtcctgtggtagtgggttatcagaac

SEQ ID NO: 25636 - DNA, 29 bp, Artificial Sequence
  synthetic circulating small noncoding RNA (sncRNA) 5' YRNA-derived fragment
tgagataactcactacctttggaccagac

SEQ ID NO: 25637 - DNA, 23 bp, Artificial Sequence
  synthetic circulating small noncoding RNA (sncRNA) 5' YRNA-derived fragment
cccactcctaaatttgcctggct

SEQ ID NO: 25638 - DNA, 29 bp, Artificial Sequence
  synthetic circulating small noncoding RNA (sncRNA) 5' YRNA-derived fragment
gatggtagtgggttatcagaacttattaa

SEQ ID NO: 25639 - DNA, 39 bp, Artificial Sequence
  synthetic circulating small noncoding RNA (sncRNA) 5' YRNA-derived fragment
ggctggtccaatggtagtggtttatcagaacttattcac

SEQ ID NO: 25640 - DNA, 25 bp, Artificial Sequence
  synthetic circulating small noncoding RNA (sncRNA) 5' YRNA-derived fragment
ggctagtcaagtgaagcagtggggg

SEQ ID NO: 25641 - DNA, 34 bp, Artificial Sequence
  synthetic circulating small noncoding RNA (sncRNA) 5' YRNA-derived fragment
ggctggtctgatggtagtgggttatcagagctta

SEQ ID NO: 25642 - DNA, 31 bp, Artificial Sequence
  synthetic circulating small noncoding RNA (sncRNA) 5' YRNA-derived fragment
gatggtagtgggttatcagaacttattaaca

SEQ ID NO: 25643 - DNA, 45 bp, Artificial Sequence
  synthetic circulating small noncoding RNA (sncRNA) 5' YRNA-derived fragment
ttctttgttccttctccactcccactgcttcacttgactagcctt

SEQ ID NO: 25644 - DNA, 20 bp, Artificial Sequence
  synthetic circulating small noncoding RNA (sncRNA) 5' YRNA-derived fragment
cgcccactgcttcacttgac

SEQ ID NO: 25645 - DNA, 21 bp, Artificial Sequence
  synthetic circulating small noncoding RNA (sncRNA) 5' YRNA-derived fragment
agtcaagtgcagtagtgagca

SEQ ID NO: 25646 - DNA, 26 bp, Artificial Sequence
  synthetic circulating small noncoding RNA (sncRNA) 5' YRNA-derived fragment
agttctgatgacccactaccatcgga

SEQ ID NO: 25647 - DNA, 26 bp, Artificial Sequence
  synthetic circulating small noncoding RNA (sncRNA) 5' YRNA-derived fragment
aagccattcaaatttagcagtggggg

SEQ ID NO: 25648 - DNA, 33 bp, Artificial Sequence
  synthetic circulating small noncoding RNA (sncRNA) 5' YRNA-derived fragment
agttctgaataacccattaccatcagaccagcc

SEQ ID NO: 25649 - DNA, 26 bp, Artificial Sequence
  synthetic circulating small noncoding RNA (sncRNA) 5' YRNA-derived fragment
cccttctcactactgcacttgactag

SEQ ID NO: 25650 - DNA, 41 bp, Artificial Sequence
  synthetic circulating small noncoding RNA (sncRNA) 5' YRNA-derived fragment
tctactctttccccccttctcactactgcacttgactagtc

SEQ ID NO: 25651 - DNA, 42 bp, Artificial Sequence
  synthetic circulating small noncoding RNA (sncRNA) 5' YRNA-derived fragment
aaggctagtcaagtgaagcagtgggagtggagaaggaacaaa

SEQ ID NO: 25652 - DNA, 26 bp, Artificial Sequence
  synthetic circulating small noncoding RNA (sncRNA) 5' YRNA-derived fragment
cccccacaactaaatttgactggctt

SEQ ID NO: 25653 - DNA, 29 bp, Artificial Sequence
  synthetic circulating small noncoding RNA (sncRNA) 5' YRNA-derived fragment
aagccagtcaaatttagcagtgagggggg

SEQ ID NO: 25654 - DNA, 37 bp, Artificial Sequence
  synthetic circulating small noncoding RNA (sncRNA) 5' YRNA-derived fragment
aggctagtcaagtgaagcagtgggagtggagaaggaa

SEQ ID NO: 25655 - DNA, 33 bp, Artificial Sequence
  synthetic circulating small noncoding RNA (sncRNA) 5' YRNA-derived fragment
taaaccagtcaaatttagcagtggggggttgta

SEQ ID NO: 25656 - DNA, 44 bp, Artificial Sequence
  synthetic circulating small noncoding RNA (sncRNA) 5' YRNA-derived fragment
tacagatttctttgttccttctccactcccactgcttcacttga

SEQ ID NO: 25657 - DNA, 40 bp, Artificial Sequence
  synthetic circulating small noncoding RNA (sncRNA) 5' YRNA-derived fragment
ggtccgatggtagtgggttatcagaacttattaacatttg

SEQ ID NO: 25658 - DNA, 20 bp, Artificial Sequence
  synthetic circulating small noncoding RNA (sncRNA) 5' YRNA-derived fragment
ggtagtgggttatcagagct

SEQ ID NO: 25659 - DNA, 22 bp, Artificial Sequence
  synthetic circulating small noncoding RNA (sncRNA) 5' YRNA-derived fragment
ctcccactgcttcacttgacta

SEQ ID NO: 25660 - DNA, 32 bp, Artificial Sequence
  synthetic circulating small noncoding RNA (sncRNA) 5' YRNA-derived fragment
tctccactccctctgcttcacttgactagcct

SEQ ID NO: 25661 - DNA, 29 bp, Artificial Sequence
  synthetic circulating small noncoding RNA (sncRNA) 5' YRNA-derived fragment
gctggtccgatggtagtgggttaccagaa

SEQ ID NO: 25662 - DNA, 19 bp, Artificial Sequence
  synthetic circulating small noncoding RNA (sncRNA) 5' YRNA-derived fragment
actgcttcacttgactagt

SEQ ID NO: 25663 - DNA, 19 bp, Artificial Sequence
  synthetic circulating small noncoding RNA (sncRNA) 5' YRNA-derived fragment
ttatcagaacttattaact

SEQ ID NO: 25664 - DNA, 42 bp, Artificial Sequence
  synthetic circulating small noncoding RNA (sncRNA) 5' YRNA-derived fragment
tttgttccttctccactcccactgcttcacttgactagccta

SEQ ID NO: 25665 - DNA, 27 bp, Artificial Sequence
  synthetic circulating small noncoding RNA (sncRNA) 5' YRNA-derived fragment
tgataacccactaccattggaccaggc

SEQ ID NO: 25666 - DNA, 24 bp, Artificial Sequence
  synthetic circulating small noncoding RNA (sncRNA) 5' YRNA-derived fragment
cgatggcagtgggttatcagaact

SEQ ID NO: 25667 - DNA, 28 bp, Artificial Sequence
  synthetic circulating small noncoding RNA (sncRNA) 5' YRNA-derived fragment
ggctggtctgaaggtagtgggttatctc

SEQ ID NO: 25668 - DNA, 24 bp, Artificial Sequence
  synthetic circulating small noncoding RNA (sncRNA) 5' YRNA-derived fragment
ttctcactactgcacttgactaat

SEQ ID NO: 25669 - DNA, 31 bp, Artificial Sequence
  synthetic circulating small noncoding RNA (sncRNA) 5' YRNA-derived fragment
ggctggtctgaaggtagtgagttatctcagt

SEQ ID NO: 25670 - DNA, 30 bp, Artificial Sequence
  synthetic circulating small noncoding RNA (sncRNA) 5' YRNA-derived fragment
ttttgataacccactaccatcagaccagcc

SEQ ID NO: 25671 - DNA, 25 bp, Artificial Sequence
  synthetic circulating small noncoding RNA (sncRNA) 5' YRNA-derived fragment
cagatggtagtgggttatcagaact

SEQ ID NO: 25672 - DNA, 20 bp, Artificial Sequence
  synthetic circulating small noncoding RNA (sncRNA) 5' YRNA-derived fragment
gatggtagtgggttatcaga

SEQ ID NO: 25673 - DNA, 19 bp, Artificial Sequence
  synthetic circulating small noncoding RNA (sncRNA) 5' YRNA-derived fragment
tactgcacttgactagtct

SEQ ID NO: 25674 - DNA, 26 bp, Artificial Sequence
  synthetic circulating small noncoding RNA (sncRNA) 5' YRNA-derived fragment
agttctgataacctactaccatcgga

SEQ ID NO: 25675 - DNA, 40 bp, Artificial Sequence
  synthetic circulating small noncoding RNA (sncRNA) 5' YRNA-derived fragment
cactaaagttggtatacaaccccccactgctaaatttgac

SEQ ID NO: 25676 - DNA, 40 bp, Artificial Sequence
  synthetic circulating small noncoding RNA (sncRNA) 5' YRNA-derived fragment
ggctggtccaatagtagtgggttatcagaacttgttaata

SEQ ID NO: 25677 - DNA, 21 bp, Artificial Sequence
  synthetic circulating small noncoding RNA (sncRNA) 5' YRNA-derived fragment
agatttctttgttccttctcc

SEQ ID NO: 25678 - DNA, 28 bp, Artificial Sequence
  synthetic circulating small noncoding RNA (sncRNA) 5' YRNA-derived fragment
ctgatgacccactaccatcggaccagcc

SEQ ID NO: 25679 - DNA, 29 bp, Artificial Sequence
  synthetic circulating small noncoding RNA (sncRNA) 5' YRNA-derived fragment
taataagttctgataacccactaccatcg

SEQ ID NO: 25680 - DNA, 42 bp, Artificial Sequence
  synthetic circulating small noncoding RNA (sncRNA) 5' YRNA-derived fragment
aggctagtcaagtgaagcagtgggagtggagaaggaacaaag

SEQ ID NO: 25681 - DNA, 25 bp, Artificial Sequence
  synthetic circulating small noncoding RNA (sncRNA) 5' YRNA-derived fragment
aggctagccaagtgaagcagtggga

SEQ ID NO: 25682 - DNA, 32 bp, Artificial Sequence
  synthetic circulating small noncoding RNA (sncRNA) 5' YRNA-derived fragment
agttctgataacccactaccatcagactaacc

SEQ ID NO: 25683 - DNA, 29 bp, Artificial Sequence
  synthetic circulating small noncoding RNA (sncRNA) 5' YRNA-derived fragment
taggctagtcaagtgaagcagtgggagtg

SEQ ID NO: 25684 - DNA, 28 bp, Artificial Sequence
  synthetic circulating small noncoding RNA (sncRNA) 5' YRNA-derived fragment
tccgagtgttgtgggttattgttaagtt

SEQ ID NO: 25685 - DNA, 25 bp, Artificial Sequence
  synthetic circulating small noncoding RNA (sncRNA) 5' YRNA-derived fragment
agccagtaaaatttagcagtgggga

SEQ ID NO: 25686 - DNA, 29 bp, Artificial Sequence
  synthetic circulating small noncoding RNA (sncRNA) 5' YRNA-derived fragment
ttcagtcaaatttagcagtggggggttgt

SEQ ID NO: 25687 - DNA, 33 bp, Artificial Sequence
  synthetic circulating small noncoding RNA (sncRNA) 5' YRNA-derived fragment
aaagccagtcaaatttagcagtggggggctata

SEQ ID NO: 25688 - DNA, 28 bp, Artificial Sequence
  synthetic circulating small noncoding RNA (sncRNA) 5' YRNA-derived fragment
ttgataacccactaccatcagaccagcc

SEQ ID NO: 25689 - DNA, 26 bp, Artificial Sequence
  synthetic circulating small noncoding RNA (sncRNA) 5' YRNA-derived fragment
gtccgagtgttgtgggttattgttaa

SEQ ID NO: 25690 - DNA, 19 bp, Artificial Sequence
  synthetic circulating small noncoding RNA (sncRNA) 5' YRNA-derived fragment
actgctacatttgactgac

SEQ ID NO: 25691 - DNA, 25 bp, Artificial Sequence
  synthetic circulating small noncoding RNA (sncRNA) 5' YRNA-derived fragment
ccccacaaccgcgcttgactagctt

SEQ ID NO: 25692 - DNA, 30 bp, Artificial Sequence
  synthetic circulating small noncoding RNA (sncRNA) 5' YRNA-derived fragment
ccccttctcactactgcacttgactagtct

SEQ ID NO: 25693 - DNA, 32 bp, Artificial Sequence; identical to SEQ ID NO: 9
  synthetic circulating small noncoding RNA (sncRNA) 5' YRNA-derived fragment

SEQ ID NO: 25694 - DNA, 39 bp, Artificial Sequence
  synthetic circulating small noncoding RNA (sncRNA) 5' YRNA-derived fragment
ggctggtccaatgatagtgggttatcagaacttattaac

SEQ ID NO: 25695 - DNA, 26 bp, Artificial Sequence
  synthetic circulating small noncoding RNA (sncRNA) 5' YRNA-derived fragment
ggctgctccaatggtagtgggttatc

SEQ ID NO: 25696 - DNA, 37 bp, Artificial Sequence
  synthetic circulating small noncoding RNA (sncRNA) 5' YRNA-derived fragment
tggtccgatggtagtgggttatcagaacttattaaca

SEQ ID NO: 25697 - DNA, 25 bp, Artificial Sequence
  synthetic circulating small noncoding RNA (sncRNA) 5' YRNA-derived fragment
ccgagtgttgtgggttattgttaag

SEQ ID NO: 25698 - DNA, 35 bp, Artificial Sequence
  synthetic circulating small noncoding RNA (sncRNA) 5' YRNA-derived fragment
ttccccccttctcactactgcacttgactagtcta

SEQ ID NO: 25699 - DNA, 19 bp, Artificial Sequence
  synthetic circulating small noncoding RNA (sncRNA) 5' YRNA-derived fragment
gagttctgataacccacta

SEQ ID NO: 25700 - DNA, 21 bp, Artificial Sequence
  synthetic circulating small noncoding RNA (sncRNA) 5' YRNA-derived fragment
ctaggcaagtgaagcagtggg

SEQ ID NO: 25701 - DNA, 35 bp, Artificial Sequence
  synthetic circulating small noncoding RNA (sncRNA) 5' YRNA-derived fragment
gtctccccccacaaccgcgcttgactagcttgctg

SEQ ID NO: 25702 - DNA, 33 bp, Artificial Sequence
  synthetic circulating small noncoding RNA (sncRNA) 5' YRNA-derived fragment
taagccagtaaaatttagcagtggggagttgta

SEQ ID NO: 25703 - DNA, 30 bp, Artificial Sequence
  synthetic circulating small noncoding RNA (sncRNA) 5' YRNA-derived fragment
gctggtacaatggtagtgggttatcagaac

SEQ ID NO: 25704 - DNA, 33 bp, Artificial Sequence
  synthetic circulating small noncoding RNA (sncRNA) 5' YRNA-derived fragment
atttctgataacccactaccatcggaccagcct

SEQ ID NO: 25705 - DNA, 22 bp, Artificial Sequence
  synthetic circulating small noncoding RNA (sncRNA) 5' YRNA-derived fragment
aagccagtaaaatttagcagtg

SEQ ID NO: 25706 - DNA, 24 bp, Artificial Sequence
  synthetic circulating small noncoding RNA (sncRNA) 5' YRNA-derived fragment
tcccgctgcttcacttgactagcc

SEQ ID NO: 25707 - DNA, 24 bp, Artificial Sequence
  synthetic circulating small noncoding RNA (sncRNA) 5' YRNA-derived fragment
gtctcactactgcacttgactagt

SEQ ID NO: 25708 - DNA, 22 bp, Artificial Sequence
  synthetic circulating small noncoding RNA (sncRNA) 5' YRNA-derived fragment
ggtccgatggtagtgggttatc

SEQ ID NO: 25709 - DNA, 38 bp, Artificial Sequence
  synthetic circulating small noncoding RNA (sncRNA) 5' YRNA-derived fragment
aggagttcgatctgtaactgactgtgaacaatcaattg

SEQ ID NO: 25710 - DNA, 27 bp, Artificial Sequence
  synthetic circulating small noncoding RNA (sncRNA) 5' YRNA-derived fragment
aaagccagtcaaatttagcggtgaggg

SEQ ID NO: 25711 - DNA, 25 bp, Artificial Sequence
  synthetic circulating small noncoding RNA (sncRNA) 5' YRNA-derived fragment
ttcccactgcttcacttgactagtt

SEQ ID NO: 25712 - DNA, 25 bp, Artificial Sequence
  synthetic circulating small noncoding RNA (sncRNA) 5' YRNA-derived fragment
tgtctcactactgcacttgactagt

SEQ ID NO: 25713 - DNA, 21 bp, Artificial Sequence
  synthetic circulating small noncoding RNA (sncRNA) 5' YRNA-derived fragment
agttctgataacccaccacca

SEQ ID NO: 25714 - DNA, 27 bp, Artificial Sequence
  synthetic circulating small noncoding RNA (sncRNA) 5' YRNA-derived fragment
ggctagtcaagtgaagcagtgggagtg

SEQ ID NO: 25715 - DNA, 28 bp, Artificial Sequence
  synthetic circulating small noncoding RNA (sncRNA) 5' YRNA-derived fragment
agttctgatgacccactaccatcggacc

SEQ ID NO: 25716 - DNA, 31 bp, Artificial Sequence
  synthetic circulating small noncoding RNA (sncRNA) 5' YRNA-derived fragment
gactagtcaagtgcagtagtgagaagggggg

SEQ ID NO: 25717 - DNA, 26 bp, Artificial Sequence
  synthetic circulating small noncoding RNA (sncRNA) 5' YRNA-derived fragment
ccactcccactgcttcacttgactag

SEQ ID NO: 25718 - DNA, 48 bp, Artificial Sequence
  synthetic circulating small noncoding RNA (sncRNA) 5' YRNA-derived fragment
gactagtcaagtgcagtagtgagaaggggggaaagagtagaacaagga

SEQ ID NO: 25719 - DNA, 27 bp, Artificial Sequence
  synthetic circulating small noncoding RNA (sncRNA) 5' YRNA-derived fragment
aacattagtgtcactaaagttggtata

SEQ ID NO: 25720 - DNA, 31 bp, Artificial Sequence
  synthetic circulating small noncoding RNA (sncRNA) 5' YRNA-derived fragment
gttctgataaccccctaccatgggaccaacc

SEQ ID NO: 25721 - DNA, 19 bp, Artificial Sequence
  synthetic circulating small noncoding RNA (sncRNA) 5' YRNA-derived fragment
tactaccatcggaccagcc

SEQ ID NO: 25722 - DNA, 18 bp, Artificial Sequence
  synthetic circulating small noncoding RNA (sncRNA) 5' YRNA-derived fragment
ccacaaccgcgcttgact

SEQ ID NO: 25723 - DNA, 29 bp, Artificial Sequence
  synthetic circulating small noncoding RNA (sncRNA) 5' YRNA-derived fragment
tgagataacccactaccttcggacgagcc

SEQ ID NO: 25724 - DNA, 28 bp, Artificial Sequence
  synthetic circulating small noncoding RNA (sncRNA) 5' YRNA-derived fragment
ggtctgatggtagtgggttatcaggact

SEQ ID NO: 25725 - DNA, 37 bp, Artificial Sequence
  synthetic circulating small noncoding RNA (sncRNA) 5' YRNA-derived fragment
tctttccccccttctcactactgcacttgactagtct

SEQ ID NO: 25726 - DNA, 34 bp, Artificial Sequence
  synthetic circulating small noncoding RNA (sncRNA) 5' YRNA-derived fragment
tctccactcccactgcttcacttgactagccttt

SEQ ID NO: 25727 - DNA, 18 bp, Artificial Sequence
  synthetic circulating small noncoding RNA (sncRNA) 5' YRNA-derived fragment
ggctggtccgaatgtagt

SEQ ID NO: 25728 - DNA, 22 bp, Artificial Sequence
  synthetic circulating small noncoding RNA (sncRNA) 5' YRNA-derived fragment
caactaattgatcacaaccagt

SEQ ID NO: 25729 - DNA, 26 bp, Artificial Sequence
  synthetic circulating small noncoding RNA (sncRNA) 5' YRNA-derived fragment
agccagccaaatttcgcagtgggggg

SEQ ID NO: 25730 - DNA, 31 bp, Artificial Sequence
  synthetic circulating small noncoding RNA (sncRNA) 5' YRNA-derived fragment
gggttatcagaacttattaacattagtgtca

SEQ ID NO: 25731 - DNA, 18 bp, Artificial Sequence
  synthetic circulating small noncoding RNA (sncRNA) 5' YRNA-derived fragment
aaaccagtcaaatttagc

SEQ ID NO: 25732 - DNA, 40 bp, Artificial Sequence
  synthetic circulating small noncoding RNA (sncRNA) 5' YRNA-derived fragment
ggctggtctgatggtagtgggttatcagagcttattaaca

SEQ ID NO: 25733 - DNA, 31 bp, Artificial Sequence
  synthetic circulating small noncoding RNA (sncRNA) 5' YRNA-derived fragment
aaaggcagtcaaatttagcagtgggggttgt

SEQ ID NO: 25734 - DNA, 19 bp, Artificial Sequence
  synthetic circulating small noncoding RNA (sncRNA) 5' YRNA-derived fragment
gtcaagtgaagcagtggga

SEQ ID NO: 25735 - DNA, 38 bp, Artificial Sequence
  synthetic circulating small noncoding RNA (sncRNA) 5' YRNA-derived fragment
ggctggtccgatggtagtgggttaccagaacttaataa

SEQ ID NO: 25736 - DNA, 34 bp, Artificial Sequence
  synthetic circulating small noncoding RNA (sncRNA) 5' YRNA-derived fragment
gtccgatggtagtgggttatcagaacttattaac

SEQ ID NO: 25737 - DNA, 31 bp, Artificial Sequence
  synthetic circulating small noncoding RNA (sncRNA) 5' YRNA-derived fragment
gttgagataactcactacctttggaccagcc

SEQ ID NO: 25738 - DNA, 23 bp, Artificial Sequence
  synthetic circulating small noncoding RNA (sncRNA) 5' YRNA-derived fragment
ccttctcactactgcacttgact

SEQ ID NO: 25739 - DNA, 39 bp, Artificial Sequence
  synthetic circulating small noncoding RNA (sncRNA) 5' YRNA-derived fragment
ttgttccttctccattcccactgcttcacttgactagtt

SEQ ID NO: 25740 - DNA, 25 bp, Artificial Sequence
  synthetic circulating small noncoding RNA (sncRNA) 5' YRNA-derived fragment
tcccactgcttcacttgactaacct

SEQ ID NO: 25741 - DNA, 32 bp, Artificial Sequence
  synthetic circulating small noncoding RNA (sncRNA) 5' YRNA-derived fragment
ggctgctccaatggtagtgggttatcaaaatt

SEQ ID NO: 25742 - DNA, 23 bp, Artificial Sequence
  synthetic circulating small noncoding RNA (sncRNA) 5' YRNA-derived fragment
tagtcaagtgcagtagtgagaag

SEQ ID NO: 25743 - DNA, 28 bp, Artificial Sequence
  synthetic circulating small noncoding RNA (sncRNA) 5' YRNA-derived fragment
ttctcactactacacttgactagtcttg

SEQ ID NO: 25744 - DNA, 18 bp, Artificial Sequence
  synthetic circulating small noncoding RNA (sncRNA) 5' YRNA-derived fragment
ctttagtgtcactaaagt

SEQ ID NO: 25745 - DNA, 36 bp, Artificial Sequence
  synthetic circulating small noncoding RNA (sncRNA) 5' YRNA-derived fragment
tggtccgatggtagtgggttatcagaacttattaac

SEQ ID NO: 25746 - DNA, 28 bp, Artificial Sequence
  synthetic circulating small noncoding RNA (sncRNA) 5' YRNA-derived fragment
aagctagtcaagtgaagcagtgggagtg

SEQ ID NO: 25747 - DNA, 18 bp, Artificial Sequence
  synthetic circulating small noncoding RNA (sncRNA) 5' YRNA-derived fragment
ccccccacaaccgcgctt

SEQ ID NO: 25748 - DNA, 23 bp, Artificial Sequence
  synthetic circulating small noncoding RNA (sncRNA) 5' YRNA-derived fragment
gtgttgtgggttattgttaagtt

SEQ ID NO: 25749 - DNA, 34 bp, Artificial Sequence
  synthetic circulating small noncoding RNA (sncRNA) 5' YRNA-derived fragment
tcaattgagataacccactaccttcggacgagcc

SEQ ID NO: 25750 - DNA, 25 bp, Artificial Sequence
  synthetic circulating small noncoding RNA (sncRNA) 5' YRNA-derived fragment
ctatggtagtgggttatcagaactt

SEQ ID NO: 25751 - DNA, 45 bp, Artificial Sequence
  synthetic circulating small noncoding RNA (sncRNA) 5' YRNA-derived fragment
gagtggagaaggaacaaagaaatctgtaactggttgtgatcaatt

SEQ ID NO: 25752 - DNA, 38 bp, Artificial Sequence
  synthetic circulating small noncoding RNA (sncRNA) 5' YRNA-derived fragment
ggctggtcagatggtagtgggttatcagaacttattaa

SEQ ID NO: 25753 - DNA, 28 bp, Artificial Sequence
  synthetic circulating small noncoding RNA (sncRNA) 5' YRNA-derived fragment
agttctgataacctactaccatcggacc

SEQ ID NO: 25754 - DNA, 24 bp, Artificial Sequence
  synthetic circulating small noncoding RNA (sncRNA) 5' YRNA-derived fragment
ctcccactgctaaatttgactggc

SEQ ID NO: 25755 - DNA, 34 bp, Artificial Sequence
  synthetic circulating small noncoding RNA (sncRNA) 5' YRNA-derived fragment
ttaagttctgataacccactaccattggaccagc

SEQ ID NO: 25756 - DNA, 32 bp, Artificial Sequence
  synthetic circulating small noncoding RNA (sncRNA) 5' YRNA-derived fragment
tttccactcccactgcttcacttgactagcct

SEQ ID NO: 25757 - DNA, 46 bp, Artificial Sequence
  synthetic circulating small noncoding RNA (sncRNA) 5' YRNA-derived fragment
gactgtgaacaatcaattgagataactcactaccttcggaccagcc

SEQ ID NO: 25758 - DNA, 25 bp, Artificial Sequence
  synthetic circulating small noncoding RNA (sncRNA) 5' YRNA-derived fragment
actttagtgacactaatgttaataa

SEQ ID NO: 25759 - DNA, 34 bp, Artificial Sequence
  synthetic circulating small noncoding RNA (sncRNA) 5' YRNA-derived fragment
ttcagccagtcaaatttagcagtggggggttgta

SEQ ID NO: 25760 - DNA, 28 bp, Artificial Sequence
  synthetic circulating small noncoding RNA (sncRNA) 5' YRNA-derived fragment
aaccagtcaaatttagcagtggggggtt

SEQ ID NO: 25761 - DNA, 23 bp, Artificial Sequence
  synthetic circulating small noncoding RNA (sncRNA) 5' YRNA-derived fragment
cattcaaatttagcagtgggggg

SEQ ID NO: 25762 - DNA, 22 bp, Artificial Sequence
  synthetic circulating small noncoding RNA (sncRNA) 5' YRNA-derived fragment
gcagtggggggttgtataccaa

SEQ ID NO: 25763 - DNA, 28 bp, Artificial Sequence
  synthetic circulating small noncoding RNA (sncRNA) 5' YRNA-derived fragment
gttctgataacccactaccattggacaa

SEQ ID NO: 25764 - DNA, 32 bp, Artificial Sequence
  synthetic circulating small noncoding RNA (sncRNA) 5' YRNA-derived fragment
tccccccttctcactactgcacttgactagtc

SEQ ID NO: 25765 - DNA, 35 bp, Artificial Sequence
  synthetic circulating small noncoding RNA (sncRNA) 5' YRNA-derived fragment
gggttatcagaacttattaacattagtgtcactaa

SEQ ID NO: 25766 - DNA, 20 bp, Artificial Sequence
  synthetic circulating small noncoding RNA (sncRNA) 5' YRNA-derived fragment
actgctatatttgactggct

SEQ ID NO: 25767 - DNA, 38 bp, Artificial Sequence
  synthetic circulating small noncoding RNA (sncRNA) 5' YRNA-derived fragment
ttaataagttctgataacccactaccatccgacaagcc

SEQ ID NO: 25768 - DNA, 18 bp, Artificial Sequence
  synthetic circulating small noncoding RNA (sncRNA) 5' YRNA-derived fragment
caataacccacaacactc

SEQ ID NO: 25769 - DNA, 34 bp, Artificial Sequence
  synthetic circulating small noncoding RNA (sncRNA) 5' YRNA-derived fragment
aagctagtcaagtgaagcagtgggagtggagaag

SEQ ID NO: 25770 - DNA, 23 bp, Artificial Sequence
  synthetic circulating small noncoding RNA (sncRNA) 5' YRNA-derived fragment
aacccactaccttcggacgagcc

SEQ ID NO: 25771 - DNA, 38 bp, Artificial Sequence
  synthetic circulating small noncoding RNA (sncRNA) 5' YRNA-derived fragment
ctggtccgatggtagtgggttatcagaacttattaaca

SEQ ID NO: 25772 - DNA, 18 bp, Artificial Sequence
  synthetic circulating small noncoding RNA (sncRNA) 5' YRNA-derived fragment
aagacagtcaaatttagc

SEQ ID NO: 25773 - DNA, 29 bp, Artificial Sequence
  synthetic circulating small noncoding RNA (sncRNA) 5' YRNA-derived fragment
ttgagataactccctaccttcgggccagc

SEQ ID NO: 25774 - DNA, 41 bp, Artificial Sequence
  synthetic circulating small noncoding RNA (sncRNA) 5' YRNA-derived fragment
gctggtccgatggtagtgggttatcagaacttattaacatt

SEQ ID NO: 25775 - DNA, 22 bp, Artificial Sequence
  synthetic circulating small noncoding RNA (sncRNA) 5' YRNA-derived fragment
tccttgttctactctttccccc

SEQ ID NO: 25776 - DNA, 23 bp, Artificial Sequence
  synthetic circulating small noncoding RNA (sncRNA) 5' YRNA-derived fragment
ttctcactactgcacttggctag

SEQ ID NO: 25777 - DNA, 28 bp, Artificial Sequence
  synthetic circulating small noncoding RNA (sncRNA) 5' YRNA-derived fragment
gttctcactactgcacttgactagtctg

SEQ ID NO: 25778 - DNA, 34 bp, Artificial Sequence
  synthetic circulating small noncoding RNA (sncRNA) 5' YRNA-derived fragment
tcaattgagataactcactacctttggaccagac

SEQ ID NO: 25779 - DNA, 36 bp, Artificial Sequence
  synthetic circulating small noncoding RNA (sncRNA) 5' YRNA-derived fragment
aataagttctgataacccactaccattggaccaacc

SEQ ID NO: 25780 - DNA, 27 bp, Artificial Sequence
  synthetic circulating small noncoding RNA (sncRNA) 5' YRNA-derived fragment
cactcccactgcttcacttgactagcc

SEQ ID NO: 25781 - DNA, 23 bp, Artificial Sequence
  synthetic circulating small noncoding RNA (sncRNA) 5' YRNA-derived fragment
cagtcaaatttagcagtgtgggg

SEQ ID NO: 25782 - DNA, 29 bp, Artificial Sequence
  synthetic circulating small noncoding RNA (sncRNA) 5' YRNA-derived fragment
gtctccccccacaaccgcgcttgactagc

SEQ ID NO: 25783 - DNA, 19 bp, Artificial Sequence
  synthetic circulating small noncoding RNA (sncRNA) 5' YRNA-derived fragment
ccgatggtagtgggttatc

SEQ ID NO: 25784 - DNA, 34 bp, Artificial Sequence
  synthetic circulating small noncoding RNA (sncRNA) 5' YRNA-derived fragment
tctttccccccttctcactactgcacttgactag

SEQ ID NO: 25785 - DNA, 24 bp, Artificial Sequence
  synthetic circulating small noncoding RNA (sncRNA) 5' YRNA-derived fragment
cgagtgttgtgggttattgttaag

SEQ ID NO: 25786 - DNA, 32 bp, Artificial Sequence
  synthetic circulating small noncoding RNA (sncRNA) 5' YRNA-derived fragment
cttctccactcccactgcttcacttgactagc

SEQ ID NO: 25787 - DNA, 26 bp, Artificial Sequence
  synthetic circulating small noncoding RNA (sncRNA) 5' YRNA-derived fragment
gttgtgggttattgttaagttgattt

SEQ ID NO: 25788 - DNA, 36 bp, Artificial Sequence
  synthetic circulating small noncoding RNA (sncRNA) 5' YRNA-derived fragment
tgttaataagttctgataacccactaccatcggacc

SEQ ID NO: 25789 - DNA, 29 bp, Artificial Sequence
  synthetic circulating small noncoding RNA (sncRNA) 5' YRNA-derived fragment
agctctgacaacccactaccatcggacca

SEQ ID NO: 25790 - DNA, 28 bp, Artificial Sequence
  synthetic circulating small noncoding RNA (sncRNA) 5' YRNA-derived fragment
acaaccccccactgctaaatttgactgg

SEQ ID NO: 25791 - DNA, 37 bp, Artificial Sequence
  synthetic circulating small noncoding RNA (sncRNA) 5' YRNA-derived fragment
agccagtcaaatttagcagtggggggttgtataccaa

SEQ ID NO: 25792 - DNA, 18 bp, Artificial Sequence
  synthetic circulating small noncoding RNA (sncRNA) 5' YRNA-derived fragment
gctaagtttgactggctt

SEQ ID NO: 25793 - DNA, 18 bp, Artificial Sequence
  synthetic circulating small noncoding RNA (sncRNA) 5' YRNA-derived fragment
ggctggtccgatggtagc

SEQ ID NO: 25794 - DNA, 30 bp, Artificial Sequence
  synthetic circulating small noncoding RNA (sncRNA) 5' YRNA-derived fragment
aggagttcgatctgtaactgactgtgaaca

SEQ ID NO: 25795 - DNA, 19 bp, Artificial Sequence
  synthetic circulating small noncoding RNA (sncRNA) 5' YRNA-derived fragment
ggctggtccgatggtagcg

SEQ ID NO: 25796 - DNA, 25 bp, Artificial Sequence
  synthetic circulating small noncoding RNA (sncRNA) 5' YRNA-derived fragment
ggctggtccaatggtagtggtttat

SEQ ID NO: 25797 - DNA, 29 bp, Artificial Sequence
  synthetic circulating small noncoding RNA (sncRNA) 5' YRNA-derived fragment
tggtcagatggtagtgggttatcagaact

SEQ ID NO: 25798 - DNA, 30 bp, Artificial Sequence
  synthetic circulating small noncoding RNA (sncRNA) 5' YRNA-derived fragment
agactagtcaagtgcagtagtgagaagggg

SEQ ID NO: 25799 - DNA, 44 bp, Artificial Sequence
  synthetic circulating small noncoding RNA (sncRNA) 5' YRNA-derived fragment
actaaagttggtatacaaccccccactgctaaatttgactggct

SEQ ID NO: 25800 - DNA, 26 bp, Artificial Sequence
  synthetic circulating small noncoding RNA (sncRNA) 5' YRNA-derived fragment
tcccactgcttcacttgactagccaa

SEQ ID NO: 25801 - DNA, 23 bp, Artificial Sequence
  synthetic circulating small noncoding RNA (sncRNA) 5' YRNA-derived fragment
ctagtcaagtgcattagtgagga

SEQ ID NO: 25802 - DNA, 28 bp, Artificial Sequence
  synthetic circulating small noncoding RNA (sncRNA) 5' YRNA-derived fragment
ctcccactgcttcacttgactagcctaa

SEQ ID NO: 25803 - DNA, 22 bp, Artificial Sequence
  synthetic circulating small noncoding RNA (sncRNA) 5' YRNA-derived fragment
actgcttcacttgactagaaaa

SEQ ID NO: 25804 - DNA, 23 bp, Artificial Sequence
  synthetic circulating small noncoding RNA (sncRNA) 5' YRNA-derived fragment
actgctaaatttgactggctttt

SEQ ID NO: 25805 - DNA, 26 bp, Artificial Sequence
  synthetic circulating small noncoding RNA (sncRNA) 5' YRNA-derived fragment
agactagtcaagtgcaggagtgagaa

SEQ ID NO: 25806 - DNA, 18 bp, Artificial Sequence
  synthetic circulating small noncoding RNA (sncRNA) 5' YRNA-derived fragment
cttctcactactgcactt

SEQ ID NO: 25807 - DNA, 24 bp, Artificial Sequence
  synthetic circulating small noncoding RNA (sncRNA) 5' YRNA-derived fragment
ctgatggtagtgggttatcagaac

SEQ ID NO: 25808 - DNA, 25 bp, Artificial Sequence
  synthetic circulating small noncoding RNA (sncRNA) 5' YRNA-derived fragment
acagatcgaactccttgttctactc

SEQ ID NO: 25809 - DNA, 19 bp, Artificial Sequence
  synthetic circulating small noncoding RNA (sncRNA) 5' YRNA-derived fragment
ctactgcacttgactagta

SEQ ID NO: 25810 - DNA, 30 bp, Artificial Sequence
  synthetic circulating small noncoding RNA (sncRNA) 5' YRNA-derived fragment
ttctgataacccactactatcggaccagcc

SEQ ID NO: 25811 - DNA, 19 bp, Artificial Sequence
  synthetic circulating small noncoding RNA (sncRNA) 5' YRNA-derived fragment
actgctatatttgactggc

SEQ ID NO: 25812 - DNA, 23 bp, Artificial Sequence
  synthetic circulating small noncoding RNA (sncRNA) 5' YRNA-derived fragment
ggcttttccgatggtagtgggtt

SEQ ID NO: 25813 - DNA, 24 bp, Artificial Sequence
  synthetic circulating small noncoding RNA (sncRNA) 5' YRNA-derived fragment
actttagtgacactaatgttaata

SEQ ID NO: 25814 - DNA, 22 bp, Artificial Sequence
  synthetic circulating small noncoding RNA (sncRNA) 5' YRNA-derived fragment
actgcttcacttgactagccta

SEQ ID NO: 25815 - DNA, 33 bp, Artificial Sequence
  synthetic circulating small noncoding RNA (sncRNA) 5' YRNA-derived fragment
ggctggtccgagtgcagtggtgtttacaactaa

SEQ ID NO: 25816 - DNA, 18 bp, Artificial Sequence
  synthetic circulating small noncoding RNA (sncRNA) 5' YRNA-derived fragment
actaccatcagaccagac

SEQ ID NO: 25817 - DNA, 25 bp, Artificial Sequence
  synthetic circulating small noncoding RNA (sncRNA) 5' YRNA-derived fragment
tctcactactgcacttgactagtct

SEQ ID NO: 25818 - DNA, 29 bp, Artificial Sequence
  synthetic circulating small noncoding RNA (sncRNA) 5' YRNA-derived fragment
agttctgagaacccaataccatcagacca

SEQ ID NO: 25819 - DNA, 20 bp, Artificial Sequence
  synthetic circulating small noncoding RNA (sncRNA) 5' YRNA-derived fragment
ggctggtccgatggtagtga

SEQ ID NO: 25820 - DNA, 31 bp, Artificial Sequence
  synthetic circulating small noncoding RNA (sncRNA) 5' YRNA-derived fragment
accccccactgctaaatttgactggcttttt

SEQ ID NO: 25821 - DNA, 18 bp, Artificial Sequence
  synthetic circulating small noncoding RNA (sncRNA) 5' YRNA-derived fragment
cctaccttcggaccagcc

SEQ ID NO: 25822 - DNA, 31 bp, Artificial Sequence
  synthetic circulating small noncoding RNA (sncRNA) 5' YRNA-derived fragment
gctggtcctatggtagtgggttatcagaact

SEQ ID NO: 25823 - DNA, 18 bp, Artificial Sequence
  synthetic circulating small noncoding RNA (sncRNA) 5' YRNA-derived fragment
gcagtgggttatcagaac

SEQ ID NO: 25824 - DNA, 29 bp, Artificial Sequence
  synthetic circulating small noncoding RNA (sncRNA) 5' YRNA-derived fragment
tggtccaatggtagtggtttatcagaact

SEQ ID NO: 25825 - DNA, 21 bp, Artificial Sequence
  synthetic circulating small noncoding RNA (sncRNA) 5' YRNA-derived fragment
agtcaagtgaagcagtggggg

SEQ ID NO: 25826 - DNA, 32 bp, Artificial Sequence
  synthetic circulating small noncoding RNA (sncRNA) 5' YRNA-derived fragment
aatttctgataacccactaccatcggaccagc

SEQ ID NO: 25827 - DNA, 22 bp, Artificial Sequence
  synthetic circulating small noncoding RNA (sncRNA) 5' YRNA-derived fragment
tccgatggtagtgggttatcag

SEQ ID NO: 25828 - DNA, 45 bp, Artificial Sequence
  synthetic circulating small noncoding RNA (sncRNA) 5' YRNA-derived fragment
tccttgttctactctttcccccttctcactactgcacttgactag

SEQ ID NO: 25829 - DNA, 22 bp, Artificial Sequence
  synthetic circulating small noncoding RNA (sncRNA) 5' YRNA-derived fragment
ccactgcttcacttgactagtt

SEQ ID NO: 25830 - DNA, 32 bp, Artificial Sequence
  synthetic circulating small noncoding RNA (sncRNA) 5' YRNA-derived fragment
actagtcaagtgaagcagtgggagtggagaag

SEQ ID NO: 25831 - DNA, 36 bp, Artificial Sequence
  synthetic circulating small noncoding RNA (sncRNA) 5' YRNA-derived fragment
aataagttctgataacccactaccatcagaccagct

SEQ ID NO: 25832 - DNA, 19 bp, Artificial Sequence
  synthetic circulating small noncoding RNA (sncRNA) 5' YRNA-derived fragment
ttctcactactgcacttga

SEQ ID NO: 25833 - DNA, 26 bp, Artificial Sequence
  synthetic circulating small noncoding RNA (sncRNA) 5' YRNA-derived fragment
attcccactgcttcacttgactagtt

SEQ ID NO: 25834 - DNA, 28 bp, Artificial Sequence
  synthetic circulating small noncoding RNA (sncRNA) 5' YRNA-derived fragment
ggctggtacaatggtagtgggttatcag

SEQ ID NO: 25835 - DNA, 32 bp, Artificial Sequence
  synthetic circulating small noncoding RNA (sncRNA) 5' YRNA-derived fragment
ttctccattcccactgcttcacttgactagtt

SEQ ID NO: 25836 - DNA, 22 bp, Artificial Sequence
  synthetic circulating small noncoding RNA (sncRNA) 5' YRNA-derived fragment
tgtggtagtgggttatcagaac

SEQ ID NO: 25837 - DNA, 35 bp, Artificial Sequence
  synthetic circulating small noncoding RNA (sncRNA) 5' YRNA-derived fragment
ctttccccccttctcactactgcacttgactaaaa

SEQ ID NO: 25838 - DNA, 30 bp, Artificial Sequence
  synthetic circulating small noncoding RNA (sncRNA) 5' YRNA-derived fragment
gtctccccccacaaccgcgcttgactagct

SEQ ID NO: 25839 - DNA, 26 bp, Artificial Sequence
  synthetic circulating small noncoding RNA (sncRNA) 5' YRNA-derived fragment
agacagtcaaatttagcagtggagag

SEQ ID NO: 25840 - DNA, 20 bp, Artificial Sequence
  synthetic circulating small noncoding RNA (sncRNA) 5' YRNA-derived fragment
taacaataacccacaacact

SEQ ID NO: 25841 - DNA, 27 bp, Artificial Sequence
  synthetic circulating small noncoding RNA (sncRNA) 5' YRNA-derived fragment
aaaccagtcaaatttagcagtaggggg

SEQ ID NO: 25842 - DNA, 20 bp, Artificial Sequence
  synthetic circulating small noncoding RNA (sncRNA) 5' YRNA-derived fragment
actagtcaagtgaagcagtg

SEQ ID NO: 25843 - DNA, 29 bp, Artificial Sequence
  synthetic circulating small noncoding RNA (sncRNA) 5' YRNA-derived fragment
ggtggtccaatggtagtgggttatcagaa

SEQ ID NO: 25844 - DNA, 27 bp, Artificial Sequence
  synthetic circulating small noncoding RNA (sncRNA) 5' YRNA-derived fragment
taactagtcaagtgtattagtgagaag

SEQ ID NO: 25845 - DNA, 38 bp, Artificial Sequence
  synthetic circulating small noncoding RNA (sncRNA) 5' YRNA-derived fragment
tatacaaccccccactgctaaatttgactggcttttta

SEQ ID NO: 25846 - DNA, 20 bp, Artificial Sequence
  synthetic circulating small noncoding RNA (sncRNA) 5' YRNA-derived fragment
gcagtgggttatcagaactt

SEQ ID NO: 25847 - DNA, 20 bp, Artificial Sequence
  synthetic circulating small noncoding RNA (sncRNA) 5' YRNA-derived fragment
gtagtgggttatcagagctt

SEQ ID NO: 25848 - DNA, 27 bp, Artificial Sequence
  synthetic circulating small noncoding RNA (sncRNA) 5' YRNA-derived fragment
cagtcaaatttagcagtggggggttgt

SEQ ID NO: 25849 - DNA, 23 bp, Artificial Sequence
  synthetic circulating small noncoding RNA (sncRNA) 5' YRNA-derived fragment
cagtcagattttagcagtggggg

SEQ ID NO: 25850 - DNA, 23 bp, Artificial Sequence
  synthetic circulating small noncoding RNA (sncRNA) 5' YRNA-derived fragment
tcccccactgctaaatttgactg

SEQ ID NO: 25851 - DNA, 22 bp, Artificial Sequence
  synthetic circulating small noncoding RNA (sncRNA) 5' YRNA-derived fragment
acccactaccatccgacaagcc

SEQ ID NO: 25852 - DNA, 26 bp, Artificial Sequence
  synthetic circulating small noncoding RNA (sncRNA) 5' YRNA-derived fragment
gataacccactaccatcgaaccagcc

SEQ ID NO: 25853 - DNA, 33 bp, Artificial Sequence
  synthetic circulating small noncoding RNA (sncRNA) 5' YRNA-derived fragment
gtttggtccaatggtagtgggttatcagaactt

SEQ ID NO: 25854 - DNA, 27 bp, Artificial Sequence
  synthetic circulating small noncoding RNA (sncRNA) 5' YRNA-derived fragment
caaccccccactgctaaatttgactgg

SEQ ID NO: 25855 - DNA, 25 bp, Artificial Sequence
  synthetic circulating small noncoding RNA (sncRNA) 5' YRNA-derived fragment
gccagtcaaatttagcagtggggtg

SEQ ID NO: 25856 - DNA, 31 bp, Artificial Sequence
  synthetic circulating small noncoding RNA (sncRNA) 5' YRNA-derived fragment
agttctgatgacccactaccatcggaccagc

SEQ ID NO: 25857 - DNA, 32 bp, Artificial Sequence
  synthetic circulating small noncoding RNA (sncRNA) 5' YRNA-derived fragment
aaagccagtcaaatttagcagtggggggctat

SEQ ID NO: 25858 - DNA, 25 bp, Artificial Sequence
  synthetic circulating small noncoding RNA (sncRNA) 5' YRNA-derived fragment
agtagaacaaggagttcgatctgta

SEQ ID NO: 25859 - DNA, 24 bp, Artificial Sequence
  synthetic circulating small noncoding RNA (sncRNA) 5' YRNA-derived fragment
acagtcacatttagtagtgggggg

SEQ ID NO: 25860 - DNA, 27 bp, Artificial Sequence
  synthetic circulating small noncoding RNA (sncRNA) 5' YRNA-derived fragment
gttctgataaccccctaccatgggacc

SEQ ID NO: 25861 - DNA, 31 bp, Artificial Sequence
  synthetic circulating small noncoding RNA (sncRNA) 5' YRNA-derived fragment
tctccccccacaaccgcgcttgactagcttg

SEQ ID NO: 25862 - DNA, 23 bp, Artificial Sequence
  synthetic circulating small noncoding RNA (sncRNA) 5' YRNA-derived fragment
ggctagtcaagtgaagcagtggg

SEQ ID NO: 25863 - DNA, 31 bp, Artificial Sequence
  synthetic circulating small noncoding RNA (sncRNA) 5' YRNA-derived fragment
caattgagataactcactaccttcggaccag

SEQ ID NO: 25864 - DNA, 25 bp, Artificial Sequence
  synthetic circulating small noncoding RNA (sncRNA) 5' YRNA-derived fragment
tgccactgcttcacctgactagcct

SEQ ID NO: 25865 - DNA, 40 bp, Artificial Sequence
  synthetic circulating small noncoding RNA (sncRNA) 5' YRNA-derived fragment
ctttgttccttctccactcccactgcttcacttgactagc

SEQ ID NO: 25866 - DNA, 20 bp, Artificial Sequence
  synthetic circulating small noncoding RNA (sncRNA) 5' YRNA-derived fragment
gttcgatctgtaactgactg

SEQ ID NO: 25867 - DNA, 32 bp, Artificial Sequence
  synthetic circulating small noncoding RNA (sncRNA) 5' YRNA-derived fragment
aattctgataatccactcccatcagaccaacc

SEQ ID NO: 25868 - DNA, 31 bp, Artificial Sequence
  synthetic circulating small noncoding RNA (sncRNA) 5' YRNA-derived fragment
ctccccccacaaccgcgcttgactagcttgc

SEQ ID NO: 25869 - DNA, 31 bp, Artificial Sequence
  synthetic circulating small noncoding RNA (sncRNA) 5' YRNA-derived fragment
agttctgataacccactaccatcagaccagc

SEQ ID NO: 25870 - DNA, 27 bp, Artificial Sequence
  synthetic circulating small noncoding RNA (sncRNA) 5' YRNA-derived fragment
cccccccactgctaaatttgactggct

SEQ ID NO: 25871 - DNA, 30 bp, Artificial Sequence
  synthetic circulating small noncoding RNA (sncRNA) 5' YRNA-derived fragment
aagccagtcaaatttagcagtggggggact

SEQ ID NO: 25872 - DNA, 21 bp, Artificial Sequence
  synthetic circulating small noncoding RNA (sncRNA) 5' YRNA-derived fragment
tttcagtcaaatttagcagtg

SEQ ID NO: 25873 - DNA, 28 bp, Artificial Sequence
  synthetic circulating small noncoding RNA (sncRNA) 5' YRNA-derived fragment
agttctgataacccactaccatcagacc

SEQ ID NO: 25874 - DNA, 31 bp, Artificial Sequence
  synthetic circulating small noncoding RNA (sncRNA) 5' YRNA-derived fragment
agttctgataacccactaccattggaccagc

SEQ ID NO: 25875 - DNA, 40 bp, Artificial Sequence
  synthetic circulating small noncoding RNA (sncRNA) 5' YRNA-derived fragment
aggctagtcaagtgaagcagtgggagtggagaaggaacaa

SEQ ID NO: 25876 - DNA, 31 bp, Artificial Sequence
  synthetic circulating small noncoding RNA (sncRNA) 5' YRNA-derived fragment
tttcagtcaaatttagcagtggggggttgta

SEQ ID NO: 25877 - DNA, 22 bp, Artificial Sequence
  synthetic circulating small noncoding RNA (sncRNA) 5' YRNA-derived fragment
gtggtagtgggttatcagaact

SEQ ID NO: 25878 - DNA, 28 bp, Artificial Sequence
  synthetic circulating small noncoding RNA (sncRNA) 5' YRNA-derived fragment
ggtccaatgatagtgggttatcagaact

SEQ ID NO: 25879 - DNA, 39 bp, Artificial Sequence
  synthetic circulating small noncoding RNA (sncRNA) 5' YRNA-derived fragment
tgattgtctgaaggtagtgagttatctcaattgattgtt

SEQ ID NO: 25880 - DNA, 32 bp, Artificial Sequence
  synthetic circulating small noncoding RNA (sncRNA) 5' YRNA-derived fragment
aagccattcaaatttagcagtggggggttgta

SEQ ID NO: 25881 - DNA, 35 bp, Artificial Sequence
  synthetic circulating small noncoding RNA (sncRNA) 5' YRNA-derived fragment
taaaccagtcaaatttagcagtggggggttgtata

SEQ ID NO: 25882 - DNA, 30 bp, Artificial Sequence
  synthetic circulating small noncoding RNA (sncRNA) 5' YRNA-derived fragment
tttaagactagtcaagtgcagtagtgagaa

SEQ ID NO: 25883 - DNA, 25 bp, Artificial Sequence
  synthetic circulating small noncoding RNA (sncRNA) 5' YRNA-derived fragment
gactggtccgaaggtagtgagttat

SEQ ID NO: 25884 - DNA, 30 bp, Artificial Sequence
  synthetic circulating small noncoding RNA (sncRNA) 5' YRNA-derived fragment
attagataactcactaccttcagaccagcc

SEQ ID NO: 25885 - DNA, 24 bp, Artificial Sequence
  synthetic circulating small noncoding RNA (sncRNA) 5' YRNA-derived fragment
cgatggtagtgatttatcagaact

SEQ ID NO: 25886 - DNA, 24 bp, Artificial Sequence
  synthetic circulating small noncoding RNA (sncRNA) 5' YRNA-derived fragment
gtgggttatcagaacttattaaca

SEQ ID NO: 25887 - DNA, 25 bp, Artificial Sequence
  synthetic circulating small noncoding RNA (sncRNA) 5' YRNA-derived fragment
agttctgataacccactaccatcga

SEQ ID NO: 25888 - DNA, 33 bp, Artificial Sequence
  synthetic circulating small noncoding RNA (sncRNA) 5' YRNA-derived fragment
gtagaacaaggagttcgatctgtaactgactgt

SEQ ID NO: 25889 - DNA, 29 bp, Artificial Sequence
  synthetic circulating small noncoding RNA (sncRNA) 5' YRNA-derived fragment
aataagttctgataacccactaccatcgg

SEQ ID NO: 25890 - DNA, 19 bp, Artificial Sequence
  synthetic circulating small noncoding RNA (sncRNA) 5' YRNA-derived fragment
aagttctgataaccaacta

SEQ ID NO: 25891 - DNA, 26 bp, Artificial Sequence
  synthetic circulating small noncoding RNA (sncRNA) 5' YRNA-derived fragment
aagaactcactaccttcggagcagcc

SEQ ID NO: 25892 - DNA, 34 bp, Artificial Sequence
  synthetic circulating small noncoding RNA (sncRNA) 5' YRNA-derived fragment
ctggtccgatggtagtgggttatcagaacttatt

SEQ ID NO: 25893 - DNA, 25 bp, Artificial Sequence
  synthetic circulating small noncoding RNA (sncRNA) 5' YRNA-derived fragment
cgcccactgcttcacttgactagct

SEQ ID NO: 25894 - DNA, 22 bp, Artificial Sequence
  synthetic circulating small noncoding RNA (sncRNA) 5' YRNA-derived fragment
gtgttgtgggttattgttaagt

SEQ ID NO: 25895 - DNA, 26 bp, Artificial Sequence
  synthetic circulating small noncoding RNA (sncRNA) 5' YRNA-derived fragment
cacagtcagttacagatcgaactcct

SEQ ID NO: 25896 - DNA, 27 bp, Artificial Sequence
  synthetic circulating small noncoding RNA (sncRNA) 5' YRNA-derived fragment
gactggtccgaaggtagtgagttatct

SEQ ID NO: 25897 - DNA, 27 bp, Artificial Sequence
  synthetic circulating small noncoding RNA (sncRNA) 5' YRNA-derived fragment
ctttcagtcaaatttagcagtgggggg

SEQ ID NO: 25898 - DNA, 21 bp, Artificial Sequence
  synthetic circulating small noncoding RNA (sncRNA) 5' YRNA-derived fragment
agtgggttatcagaacttata

SEQ ID NO: 25899 - DNA, 38 bp, Artificial Sequence
  synthetic circulating small noncoding RNA (sncRNA) 5' YRNA-derived fragment
accagtcaaatttagcagtggggggttgtataccaact

SEQ ID NO: 25900 - DNA, 42 bp, Artificial Sequence
  synthetic circulating small noncoding RNA (sncRNA) 5' YRNA-derived fragment
gtgaacaatcaattgagataactcactaccttcggaccagcc

SEQ ID NO: 25901 - DNA, 41 bp, Artificial Sequence
  synthetic circulating small noncoding RNA (sncRNA) 5' YRNA-derived fragment
ctactctttccccccttctcactactgcacttgactagtct

SEQ ID NO: 25902 - DNA, 20 bp, Artificial Sequence
  synthetic circulating small noncoding RNA (sncRNA) 5' YRNA-derived fragment
agtagtgggttatcagaaca

SEQ ID NO: 25903 - DNA, 29 bp, Artificial Sequence
  synthetic circulating small noncoding RNA (sncRNA) 5' YRNA-derived fragment
agactagtcaagtgaagcagtgggagtgg

SEQ ID NO: 25904 - DNA, 38 bp, Artificial Sequence
  synthetic circulating small noncoding RNA (sncRNA) 5' YRNA-derived fragment
ctccttgttctactctttccccccttctcactactgca

SEQ ID NO: 25905 - DNA, 34 bp, Artificial Sequence
  synthetic circulating small noncoding RNA (sncRNA) 5' YRNA-derived fragment
taataagttctgataacccactaccatcggacca

SEQ ID NO: 25906 - DNA, 44 bp, Artificial Sequence
  synthetic circulating small noncoding RNA (sncRNA) 5' YRNA-derived fragment
cagttggtccgagtgttgtgggttattgttaagttgatttaaca

SEQ ID NO: 25907 - DNA, 31 bp, Artificial Sequence
  synthetic circulating small noncoding RNA (sncRNA) 5' YRNA-derived fragment
agttctgataaccccctaccatgggaccaac

SEQ ID NO: 25908 - DNA, 31 bp, Artificial Sequence
  synthetic circulating small noncoding RNA (sncRNA) 5' YRNA-derived fragment
aagttctgataacccactaccatcggaccag

SEQ ID NO: 25909 - DNA, 40 bp, Artificial Sequence
  synthetic circulating small noncoding RNA (sncRNA) 5' YRNA-derived fragment
taaagttggtatacaaccccccactgctaaatttgactgg

SEQ ID NO: 25910 - DNA, 30 bp, Artificial Sequence
  synthetic circulating small noncoding RNA (sncRNA) 5' YRNA-derived fragment
ttctgataacccactaccattggaccaggc

SEQ ID NO: 25911 - DNA, 29 bp, Artificial Sequence
  synthetic circulating small noncoding RNA (sncRNA) 5' YRNA-derived fragment
ggcttgtccgagtgcagtggtgtttacaa

SEQ ID NO: 25912 - DNA, 22 bp, Artificial Sequence
  synthetic circulating small noncoding RNA (sncRNA) 5' YRNA-derived fragment
actgcttcacttgactagcctt

SEQ ID NO: 25913 - DNA, 40 bp, Artificial Sequence
  synthetic circulating small noncoding RNA (sncRNA) 5' YRNA-derived fragment
tgttaataagttctgataacctactaccatcggaccagcc

SEQ ID NO: 25914 - DNA, 39 bp, Artificial Sequence
  synthetic circulating small noncoding RNA (sncRNA) 5' YRNA-derived fragment
aacaatcaattgagataactcactacctttggaccagac

SEQ ID NO: 25915 - DNA, 32 bp, Artificial Sequence
  synthetic circulating small noncoding RNA (sncRNA) 5' YRNA-derived fragment
aagttctgataacctactaccatcggaccagc

SEQ ID NO: 25916 - DNA, 33 bp, Artificial Sequence
  synthetic circulating small noncoding RNA (sncRNA) 5' YRNA-derived fragment
aagttctgataacccactaccattggaccaacc

SEQ ID NO: 25917 - DNA, 27 bp, Artificial Sequence
  synthetic circulating small noncoding RNA (sncRNA) 5' YRNA-derived fragment
acttattaacattagtgtcactaaagt

SEQ ID NO: 25918 - DNA, 20 bp, Artificial Sequence
  synthetic circulating small noncoding RNA (sncRNA) 5' YRNA-derived fragment
aagccagccaaatttcgcag

SEQ ID NO: 25919 - DNA, 24 bp, Artificial Sequence
  synthetic circulating small noncoding RNA (sncRNA) 5' YRNA-derived fragment
acagtcagttacagatcgaactcc

SEQ ID NO: 25920 - DNA, 29 bp, Artificial Sequence
  synthetic circulating small noncoding RNA (sncRNA) 5' YRNA-derived fragment
tccccccacaaccgcgcttgactagcttg

SEQ ID NO: 25921 - DNA, 32 bp, Artificial Sequence
  synthetic circulating small noncoding RNA (sncRNA) 5' YRNA-derived fragment
ggctggtcccaaggtagtgacttatctcaatt

SEQ ID NO: 25922 - DNA, 26 bp, Artificial Sequence
  synthetic circulating small noncoding RNA (sncRNA) 5' YRNA-derived fragment
ggctggtacaatggtagtgggttatc

SEQ ID NO: 25923 - DNA, 35 bp, Artificial Sequence
  synthetic circulating small noncoding RNA (sncRNA) 5' YRNA-derived fragment
tcagccagtcaaatttagcagtggggggttgtata

SEQ ID NO: 25924 - DNA, 31 bp, Artificial Sequence
  synthetic circulating small noncoding RNA (sncRNA) 5' YRNA-derived fragment
gctggttcgatggcagtgggttatcagaact

SEQ ID NO: 25925 - DNA, 29 bp, Artificial Sequence
  synthetic circulating small noncoding RNA (sncRNA) 5' YRNA-derived fragment
gactagtcaagtgcagtagtgagaagggg

SEQ ID NO: 25926 - DNA, 37 bp, Artificial Sequence
  synthetic circulating small noncoding RNA (sncRNA) 5' YRNA-derived fragment
tccttctccactcccactgcttcacttgactagccta

SEQ ID NO: 25927 - DNA, 25 bp, Artificial Sequence
  synthetic circulating small noncoding RNA (sncRNA) 5' YRNA-derived fragment
ccccaactgctaaatttgactggct

SEQ ID NO: 25928 - DNA, 31 bp, Artificial Sequence
  synthetic circulating small noncoding RNA (sncRNA) 5' YRNA-derived fragment
attgagataactcactaccttcagacctgct

SEQ ID NO: 25929 - DNA, 21 bp, Artificial Sequence
  synthetic circulating small noncoding RNA (sncRNA) 5' YRNA-derived fragment
actggttgtgatcaattagtt

SEQ ID NO: 25930 - DNA, 20 bp, Artificial Sequence
  synthetic circulating small noncoding RNA (sncRNA) 5' YRNA-derived fragment
gtcaaatttagcagtggggg

SEQ ID NO: 25931 - DNA, 40 bp, Artificial Sequence
  synthetic circulating small noncoding RNA (sncRNA) 5' YRNA-derived fragment
tgatcaattagttgtaaacaccactgcactcggaccagcc

SEQ ID NO: 25932 - DNA, 43 bp, Artificial Sequence
  synthetic circulating small noncoding RNA (sncRNA) 5' YRNA-derived fragment
tttctttgttccttctccactcccactgcttcacttgactagc

SEQ ID NO: 25933 - DNA, 43 bp, Artificial Sequence
  synthetic circulating small noncoding RNA (sncRNA) 5' YRNA-derived fragment
aaggctagtcaagtgaagcagtgggagtggagaaggaacaaag

SEQ ID NO: 25934 - DNA, 29 bp, Artificial Sequence
  synthetic circulating small noncoding RNA (sncRNA) 5' YRNA-derived fragment
ttgagataactcactacctttggaccaga

SEQ ID NO: 25935 - DNA, 25 bp, Artificial Sequence
  synthetic circulating small noncoding RNA (sncRNA) 5' YRNA-derived fragment
ataacccactaccatcggaccagtc

SEQ ID NO: 25936 - DNA, 26 bp, Artificial Sequence
  synthetic circulating small noncoding RNA (sncRNA) 5' YRNA-derived fragment
agttctgataaccccctaccatggga

SEQ ID NO: 25937 - DNA, 31 bp, Artificial Sequence
  synthetic circulating small noncoding RNA (sncRNA) 5' YRNA-derived fragment
cccccccactgctaaatttgactggcttttt

SEQ ID NO: 25938 - DNA, 28 bp, Artificial Sequence
  synthetic circulating small noncoding RNA (sncRNA) 5' YRNA-derived fragment
ggctggtccgaaggtagtgaattatctc

SEQ ID NO: 25939 - DNA, 18 bp, Artificial Sequence
  synthetic circulating small noncoding RNA (sncRNA) 5' YRNA-derived fragment
tagtgggttaccagaact

SEQ ID NO: 25940 - DNA, 25 bp, Artificial Sequence
  synthetic circulating small noncoding RNA (sncRNA) 5' YRNA-derived fragment
gccagtcaaatttagcagtgagggg

SEQ ID NO: 25941 - DNA, 26 bp, Artificial Sequence
  synthetic circulating small noncoding RNA (sncRNA) 5' YRNA-derived fragment
aggcagtcaaatttagcagtgggggt

SEQ ID NO: 25942 - DNA, 24 bp, Artificial Sequence
  synthetic circulating small noncoding RNA (sncRNA) 5' YRNA-derived fragment
agccagtcagattttagcagtggg

SEQ ID NO: 25943 - DNA, 21 bp, Artificial Sequence
  synthetic circulating small noncoding RNA (sncRNA) 5' YRNA-derived fragment
aagacagtcaaatttagcagt

SEQ ID NO: 25944 - DNA, 30 bp, Artificial Sequence
  synthetic circulating small noncoding RNA (sncRNA) 5' YRNA-derived fragment
ggctggtctgaaggtagtgagctatctcaa

SEQ ID NO: 25945 - DNA, 35 bp, Artificial Sequence
  synthetic circulating small noncoding RNA (sncRNA) 5' YRNA-derived fragment
tacagatcgaactccttgttctactctttcccccc

SEQ ID NO: 25946 - DNA, 31 bp, Artificial Sequence
  synthetic circulating small noncoding RNA (sncRNA) 5' YRNA-derived fragment
gctgtgataacccaccaccattggaccagcc

SEQ ID NO: 25947 - DNA, 41 bp, Artificial Sequence
  synthetic circulating small noncoding RNA (sncRNA) 5' YRNA-derived fragment
taaagttggtatacaaccccccactgctaaatttgactggc

SEQ ID NO: 25948 - DNA, 25 bp, Artificial Sequence
  synthetic circulating small noncoding RNA (sncRNA) 5' YRNA-derived fragment
tcccacttcttcacttgactagcct

SEQ ID NO: 25949 - DNA, 29 bp, Artificial Sequence
  synthetic circulating small noncoding RNA (sncRNA) 5' YRNA-derived fragment
ggtccgagtgttgtgggttattgttaagt

SEQ ID NO: 25950 - DNA, 22 bp, Artificial Sequence
  synthetic circulating small noncoding RNA (sncRNA) 5' YRNA-derived fragment
aagccagtcaaatttatcagag

SEQ ID NO: 25951 - DNA, 26 bp, Artificial Sequence
  synthetic circulating small noncoding RNA (sncRNA) 5' YRNA-derived fragment
cttattaacattagtgtcactaaagt

SEQ ID NO: 25952 - DNA, 18 bp, Artificial Sequence
  synthetic circulating small noncoding RNA (sncRNA) 5' YRNA-derived fragment
tgttgtgggttattgtta

SEQ ID NO: 25953 - DNA, 29 bp, Artificial Sequence
  synthetic circulating small noncoding RNA (sncRNA) 5' YRNA-derived fragment
agttctgataacccactaccatcgaacca

SEQ ID NO: 25954 - DNA, 20 bp, Artificial Sequence
  synthetic circulating small noncoding RNA (sncRNA) 5' YRNA-derived fragment
aatgtagtgacactaatgtt

SEQ ID NO: 25955 - DNA, 35 bp, Artificial Sequence
  synthetic circulating small noncoding RNA (sncRNA) 5' YRNA-derived fragment
ttctccactcccactgcttcacttgactagcctaa

SEQ ID NO: 25956 - DNA, 22 bp, Artificial Sequence
  synthetic circulating small noncoding RNA (sncRNA) 5' YRNA-derived fragment
cagtcaaatttatcagaggggg

SEQ ID NO: 25957 - DNA, 35 bp, Artificial Sequence
  synthetic circulating small noncoding RNA (sncRNA) 5' YRNA-derived fragment
gttaataagttctgataacccactaccatcggacc

SEQ ID NO: 25958 - DNA, 34 bp, Artificial Sequence
  synthetic circulating small noncoding RNA (sncRNA) 5' YRNA-derived fragment
ggcttttccgatggtagtgggttatctgaactta

SEQ ID NO: 25959 - DNA, 30 bp, Artificial Sequence
  synthetic circulating small noncoding RNA (sncRNA) 5' YRNA-derived fragment
accccccactgctaaatttgactggctttt

SEQ ID NO: 25960 - DNA, 18 bp, Artificial Sequence
  synthetic circulating small noncoding RNA (sncRNA) 5' YRNA-derived fragment
aacaataacccacaacac

SEQ ID NO: 25961 - DNA, 22 bp, Artificial Sequence
  synthetic circulating small noncoding RNA (sncRNA) 5' YRNA-derived fragment
agtcaagtgtagtagtgagaag

SEQ ID NO: 25962 - DNA, 18 bp, Artificial Sequence
  synthetic circulating small noncoding RNA (sncRNA) 5' YRNA-derived fragment
acagatttctttgttcct

SEQ ID NO: 25963 - DNA, 39 bp, Artificial Sequence
  synthetic circulating small noncoding RNA (sncRNA) 5' YRNA-derived fragment
ggctggtccgatggtagcaggttatcagaacttattaac

SEQ ID NO: 25964 - DNA, 19 bp, Artificial Sequence
  synthetic circulating small noncoding RNA (sncRNA) 5' YRNA-derived fragment
cccactgcttcacttgact

SEQ ID NO: 25965 - DNA, 33 bp, Artificial Sequence
  synthetic circulating small noncoding RNA (sncRNA) 5' YRNA-derived fragment
aaagccagccaaatttcgcagtggggggttgta

SEQ ID NO: 25966 - DNA, 18 bp, Artificial Sequence
  synthetic circulating small noncoding RNA (sncRNA) 5' YRNA-derived fragment
actttagtgacaccaatg

SEQ ID NO: 25967 - DNA, 43 bp, Artificial Sequence
  synthetic circulating small noncoding RNA (sncRNA) 5' YRNA-derived fragment
aagccagtcaaatttagcagtggggtgttgtataccaacttca

SEQ ID NO: 25968 - DNA, 19 bp, Artificial Sequence
  synthetic circulating small noncoding RNA (sncRNA) 5' YRNA-derived fragment
ttctccactcccactgctt

SEQ ID NO: 25969 - DNA, 25 bp, Artificial Sequence
  synthetic circulating small noncoding RNA (sncRNA) 5' YRNA-derived fragment
tcccgctgcttcacttgactagcct

SEQ ID NO: 25970 - DNA, 28 bp, Artificial Sequence
  synthetic circulating small noncoding RNA (sncRNA) 5' YRNA-derived fragment
ggctggtcagaaggtagtgagttatctc

SEQ ID NO: 25971 - DNA, 26 bp, Artificial Sequence
  synthetic circulating small noncoding RNA (sncRNA) 5' YRNA-derived fragment
aggctagtcaagtgaagcagtggaaa

SEQ ID NO: 25972 - DNA, 23 bp, Artificial Sequence
  synthetic circulating small noncoding RNA (sncRNA) 5' YRNA-derived fragment
tggtccgatggtagtgggttatc

SEQ ID NO: 25973 - DNA, 32 bp, Artificial Sequence
  synthetic circulating small noncoding RNA (sncRNA) 5' YRNA-derived fragment
agatggtccgaaggtagtgagttatctcaatt

SEQ ID NO: 25974 - DNA, 21 bp, Artificial Sequence
  synthetic circulating small noncoding RNA (sncRNA) 5' YRNA-derived fragment
agccagtcagattttagcagt

SEQ ID NO: 25975 - DNA, 27 bp, Artificial Sequence
  synthetic circulating small noncoding RNA (sncRNA) 5' YRNA-derived fragment
ctgataacccactaccattggaccacc

SEQ ID NO: 25976 - DNA, 20 bp, Artificial Sequence
  synthetic circulating small noncoding RNA (sncRNA) 5' YRNA-derived fragment
ttgtgggttattgttaagtt

SEQ ID NO: 25977 - DNA, 26 bp, Artificial Sequence
  synthetic circulating small noncoding RNA (sncRNA) 5' YRNA-derived fragment
actcccactgcttcacttgactagaa

SEQ ID NO: 25978 - DNA, 26 bp, Artificial Sequence
  synthetic circulating small noncoding RNA (sncRNA) 5' YRNA-derived fragment
atggtagtgggttatcagaacttatt

SEQ ID NO: 25979 - DNA, 27 bp, Artificial Sequence
  synthetic circulating small noncoding RNA (sncRNA) 5' YRNA-derived fragment
aaagctagtcaagcgtggttgtggggg

SEQ ID NO: 25980 - DNA, 27 bp, Artificial Sequence
  synthetic circulating small noncoding RNA (sncRNA) 5' YRNA-derived fragment
cactcccactgtttcacttgactagtt

SEQ ID NO: 25981 - DNA, 26 bp, Artificial Sequence
  synthetic circulating small noncoding RNA (sncRNA) 5' YRNA-derived fragment
taggctagtcaagtgaagcagtggga

SEQ ID NO: 25982 - DNA, 30 bp, Artificial Sequence
  synthetic circulating small noncoding RNA (sncRNA) 5' YRNA-derived fragment
gagtgttgtgggttattgttaagttgattt

SEQ ID NO: 25983 - DNA, 26 bp, Artificial Sequence
  synthetic circulating small noncoding RNA (sncRNA) 5' YRNA-derived fragment
ccttctcactactgcacttgactagt

SEQ ID NO: 25984 - DNA, 19 bp, Artificial Sequence
  synthetic circulating small noncoding RNA (sncRNA) 5' YRNA-derived fragment
gctaaatttgactggctta

SEQ ID NO: 25985 - DNA, 38 bp, Artificial Sequence
  synthetic circulating small noncoding RNA (sncRNA) 5' YRNA-derived fragment
gactagtcaagtgaagcagtgggagtggagaaggaaca

SEQ ID NO: 25986 - DNA, 44 bp, Artificial Sequence
  synthetic circulating small noncoding RNA (sncRNA) 5' YRNA-derived fragment
ctgtgaacaatcaattgagataactcactaccttcggaccagcc

SEQ ID NO: 25987 - DNA, 20 bp, Artificial Sequence
  synthetic circulating small noncoding RNA (sncRNA) 5' YRNA-derived fragment
ccccactgctaaatttgact

SEQ ID NO: 25988 - DNA, 20 bp, Artificial Sequence
  synthetic circulating small noncoding RNA (sncRNA) 5' YRNA-derived fragment
aacattagtgtcactaacgt

SEQ ID NO: 25989 - DNA, 28 bp, Artificial Sequence
  synthetic circulating small noncoding RNA (sncRNA) 5' YRNA-derived fragment
aattgatcacaaccagttacagatttct

SEQ ID NO: 25990 - DNA, 28 bp, Artificial Sequence
  synthetic circulating small noncoding RNA (sncRNA) 5' YRNA-derived fragment
tgttttgataacccactaccatcagacc

SEQ ID NO: 25991 - DNA, 21 bp, Artificial Sequence
  synthetic circulating small noncoding RNA (sncRNA) 5' YRNA-derived fragment
ctgcttcacttgactagcctt

SEQ ID NO: 25992 - DNA, 29 bp, Artificial Sequence
  synthetic circulating small noncoding RNA (sncRNA) 5' YRNA-derived fragment
ttgagttaactcactaccttcggaccagc

SEQ ID NO: 25993 - DNA, 26 bp, Artificial Sequence
  synthetic circulating small noncoding RNA (sncRNA) 5' YRNA-derived fragment
agataactcactaccttcggaccagc

SEQ ID NO: 25994 - DNA, 24 bp, Artificial Sequence
  synthetic circulating small noncoding RNA (sncRNA) 5' YRNA-derived fragment
gttggtccgagtgttgtgggttat

SEQ ID NO: 25995 - DNA, 24 bp, Artificial Sequence
  synthetic circulating small noncoding RNA (sncRNA) 5' YRNA-derived fragment
caatggtagtgggttatcagaact

SEQ ID NO: 25996 - DNA, 22 bp, Artificial Sequence
  synthetic circulating small noncoding RNA (sncRNA) 5' YRNA-derived fragment
ttattaacattagtgtcactaa

SEQ ID NO: 25997 - DNA, 48 bp, Artificial Sequence
  synthetic circulating small noncoding RNA (sncRNA) 5' YRNA-derived fragment
ctagtcaagtgcagtagtgagaaggggggaaagagtagaacaaggagt

SEQ ID NO: 25998 - DNA, 30 bp, Artificial Sequence
  synthetic circulating small noncoding RNA (sncRNA) 5' YRNA-derived fragment
taggctagtcaagtgaagcagtgggagtgg

SEQ ID NO: 25999 - DNA, 25 bp, Artificial Sequence
  synthetic circulating small noncoding RNA (sncRNA) 5' YRNA-derived fragment
gactagtcaagtgcagtagtgagga

SEQ ID NO: 26000 - DNA, 27 bp, Artificial Sequence
  synthetic circulating small noncoding RNA (sncRNA) 5' YRNA-derived fragment
agttacagatcgaactccttgttctac

SEQ ID NO: 26001 - DNA, 31 bp, Artificial Sequence
  synthetic circulating small noncoding RNA (sncRNA) 5' YRNA-derived fragment
attgagataactcactaccttcagaccagcc

SEQ ID NO: 26002 - DNA, 40 bp, Artificial Sequence
  synthetic circulating small noncoding RNA (sncRNA) 5' YRNA-derived fragment
gctggtcctatggtagtgggttatcagaacttattaactt

SEQ ID NO: 26003 - DNA, 24 bp, Artificial Sequence
  synthetic circulating small noncoding RNA (sncRNA) 5' YRNA-derived fragment
ctagtccagtgcagtagtgagaag

SEQ ID NO: 26004 - DNA, 23 bp, Artificial Sequence
  synthetic circulating small noncoding RNA (sncRNA) 5' YRNA-derived fragment
gacggtagtggattatccgaact

SEQ ID NO: 26005 - DNA, 43 bp, Artificial Sequence
  synthetic circulating small noncoding RNA (sncRNA) 5' YRNA-derived fragment
aaaccagtcaaatttagcagtggggggttgtataccaacttta

SEQ ID NO: 26006 - DNA, 22 bp, Artificial Sequence
  synthetic circulating small noncoding RNA (sncRNA) 5' YRNA-derived fragment
ccccactgctaaatttgactgg

SEQ ID NO: 26007 - DNA, 31 bp, Artificial Sequence
  synthetic circulating small noncoding RNA (sncRNA) 5' YRNA-derived fragment
gttctcataacctactaccatcagaccagac

SEQ ID NO: 26008 - DNA, 39 bp, Artificial Sequence
  synthetic circulating small noncoding RNA (sncRNA) 5' YRNA-derived fragment
gccagtcaaatttagcagtggggggttgtataccaactt

SEQ ID NO: 26009 - DNA, 26 bp, Artificial Sequence
  synthetic circulating small noncoding RNA (sncRNA) 5' YRNA-derived fragment
agcctagtcaagtgcagtagtgagaa

SEQ ID NO: 26010 - DNA, 22 bp, Artificial Sequence
  synthetic circulating small noncoding RNA (sncRNA) 5' YRNA-derived fragment
ttggtatacaaccccccactgc

SEQ ID NO: 26011 - DNA, 22 bp, Artificial Sequence
  synthetic circulating small noncoding RNA (sncRNA) 5' YRNA-derived fragment
gaaggtagtgagttatctcaat

SEQ ID NO: 26012 - DNA, 30 bp, Artificial Sequence
  synthetic circulating small noncoding RNA (sncRNA) 5' YRNA-derived fragment
gttgtaaacaccactgcactaggaccagac

SEQ ID NO: 26013 - DNA, 19 bp, Artificial Sequence
  synthetic circulating small noncoding RNA (sncRNA) 5' YRNA-derived fragment
gttcgatctgtaactgact

SEQ ID NO: 26014 - DNA, 26 bp, Artificial Sequence
  synthetic circulating small noncoding RNA (sncRNA) 5' YRNA-derived fragment
cgcccgctgcttcacttgactagcct

SEQ ID NO: 26015 - DNA, 23 bp, Artificial Sequence
  synthetic circulating small noncoding RNA (sncRNA) 5' YRNA-derived fragment
tcacagtcagttacagatcgaac

SEQ ID NO: 26016 - DNA, 32 bp, Artificial Sequence
  synthetic circulating small noncoding RNA (sncRNA) 5' YRNA-derived fragment
attgagataactcactaccttcggaccagcca

SEQ ID NO: 26017 - DNA, 25 bp, Artificial Sequence
  synthetic circulating small noncoding RNA (sncRNA) 5' YRNA-derived fragment
ttctcactactgcacttgactaaaa

SEQ ID NO: 26018 - DNA, 43 bp, Artificial Sequence
  synthetic circulating small noncoding RNA (sncRNA) 5' YRNA-derived fragment
gagttcgatctgtaactgactgtgaacaatcaattgagataac

SEQ ID NO: 26019 - DNA, 31 bp, Artificial Sequence
  synthetic circulating small noncoding RNA (sncRNA) 5' YRNA-derived fragment
cttctccactcccactgcttcacttgactag

SEQ ID NO: 26020 - DNA, 24 bp, Artificial Sequence
  synthetic circulating small noncoding RNA (sncRNA) 5' YRNA-derived fragment
ccactgctaaatttgactggctta

SEQ ID NO: 26021 - DNA, 24 bp, Artificial Sequence
  synthetic circulating small noncoding RNA (sncRNA) 5' YRNA-derived fragment
tttctgataacccactaccatcgg

SEQ ID NO: 26022 - DNA, 23 bp, Artificial Sequence
  synthetic circulating small noncoding RNA (sncRNA) 5' YRNA-derived fragment
accccccactgctaaatttgact

SEQ ID NO: 26023 - DNA, 31 bp, Artificial Sequence
  synthetic circulating small noncoding RNA (sncRNA) 5' YRNA-derived fragment
cttctcactactgcacttgactagtctaaaa

SEQ ID NO: 26024 - DNA, 31 bp, Artificial Sequence
  synthetic circulating small noncoding RNA (sncRNA) 5' YRNA-derived fragment
gttctgataacccactaccatcagactaacc

SEQ ID NO: 26025 - DNA, 29 bp, Artificial Sequence
  synthetic circulating small noncoding RNA (sncRNA) 5' YRNA-derived fragment
tttctgataacccactaccatcggaccag

SEQ ID NO: 26026 - DNA, 24 bp, Artificial Sequence
  synthetic circulating small noncoding RNA (sncRNA) 5' YRNA-derived fragment
atagtcaagtgaagcagtgggagt

SEQ ID NO: 26027 - DNA, 40 bp, Artificial Sequence
  synthetic circulating small noncoding RNA (sncRNA) 5' YRNA-derived fragment
gtgggttatcagaacttattaacattagtgtcactaaagt

SEQ ID NO: 26028 - DNA, 24 bp, Artificial Sequence
  synthetic circulating small noncoding RNA (sncRNA) 5' YRNA-derived fragment
tcccactgcttcacttgactagaa

SEQ ID NO: 26029 - DNA, 24 bp, Artificial Sequence
  synthetic circulating small noncoding RNA (sncRNA) 5' YRNA-derived fragment
tactagtcaagtgaaacagtggga

SEQ ID NO: 26030 - DNA, 24 bp, Artificial Sequence
  synthetic circulating small noncoding RNA (sncRNA) 5' YRNA-derived fragment
agtagaacaaggagttcgatctgt

SEQ ID NO: 26031 - DNA, 24 bp, Artificial Sequence
  synthetic circulating small noncoding RNA (sncRNA) 5' YRNA-derived fragment
tcacagtcagttacagatcgaact

SEQ ID NO: 26032 - DNA, 29 bp, Artificial Sequence
  synthetic circulating small noncoding RNA (sncRNA) 5' YRNA-derived fragment
gctggtccgaatgtagtgagttatctcaa

SEQ ID NO: 26033 - DNA, 35 bp, Artificial Sequence
  synthetic circulating small noncoding RNA (sncRNA) 5' YRNA-derived fragment
aacaattgagataactcactacctttggaccagcc

SEQ ID NO: 26034 - DNA, 20 bp, Artificial Sequence
  synthetic circulating small noncoding RNA (sncRNA) 5' YRNA-derived fragment
agctctgacaacccactacc

SEQ ID NO: 26035 - DNA, 20 bp, Artificial Sequence
  synthetic circulating small noncoding RNA (sncRNA) 5' YRNA-derived fragment
agttctgataacacactgcc

SEQ ID NO: 26036 - DNA, 38 bp, Artificial Sequence
  synthetic circulating small noncoding RNA (sncRNA) 5' YRNA-derived fragment
ctggtcctatggtagtgggttatcagaacttattaact

SEQ ID NO: 26037 - DNA, 30 bp, Artificial Sequence
  synthetic circulating small noncoding RNA (sncRNA) 5' YRNA-derived fragment
ggctgatccgaaggtagtgagttatgtcag

SEQ ID NO: 26038 - DNA, 33 bp, Artificial Sequence
  synthetic circulating small noncoding RNA (sncRNA) 5' YRNA-derived fragment
caagccagtcaaatttagcagtggggtgttgta

SEQ ID NO: 26039 - DNA, 27 bp, Artificial Sequence
  synthetic circulating small noncoding RNA (sncRNA) 5' YRNA-derived fragment
agactagtcaaatgaagcagtgggagt

SEQ ID NO: 26040 - DNA, 28 bp, Artificial Sequence
  synthetic circulating small noncoding RNA (sncRNA) 5' YRNA-derived fragment
agaaatctgtaactggttgtgatcaatt

SEQ ID NO: 26041 - DNA, 22 bp, Artificial Sequence
  synthetic circulating small noncoding RNA (sncRNA) 5' YRNA-derived fragment
tgctggtccgagtgcagtggtg

SEQ ID NO: 26042 - DNA, 18 bp, Artificial Sequence
  synthetic circulating small noncoding RNA (sncRNA) 5' YRNA-derived fragment
taaatttgactggctttt

SEQ ID NO: 26043 - DNA, 28 bp, Artificial Sequence
  synthetic circulating small noncoding RNA (sncRNA) 5' YRNA-derived fragment
ctagtcaagtgcagtagtgagaaggggg

SEQ ID NO: 26044 - DNA, 44 bp, Artificial Sequence
  synthetic circulating small noncoding RNA (sncRNA) 5' YRNA-derived fragment
ggtagtgggttatcagaacttattaacattagtgtcactaaagt

SEQ ID NO: 26045 - DNA, 48 bp, Artificial Sequence
  synthetic circulating small noncoding RNA (sncRNA) 5' YRNA-derived fragment
attagtgtcactaaagttggtatacaaccccccactgctaaatttgac

SEQ ID NO: 26046 - DNA, 21 bp, Artificial Sequence
  synthetic circulating small noncoding RNA (sncRNA) 5' YRNA-derived fragment
gagaaggaacaaagaaatctg

SEQ ID NO: 26047 - DNA, 25 bp, Artificial Sequence
  synthetic circulating small noncoding RNA (sncRNA) 5' YRNA-derived fragment
ctcccactgtttcacttgactagtt

SEQ ID NO: 26048 - DNA, 28 bp, Artificial Sequence
  synthetic circulating small noncoding RNA (sncRNA) 5' YRNA-derived fragment
agttctgatagcccactaccatcaaacc

SEQ ID NO: 26049 - DNA, 23 bp, Artificial Sequence
  synthetic circulating small noncoding RNA (sncRNA) 5' YRNA-derived fragment
ctcccactgctttacttgactag

SEQ ID NO: 26050 - DNA, 33 bp, Artificial Sequence
  synthetic circulating small noncoding RNA (sncRNA) 5' YRNA-derived fragment
gggctggtccaaaggtagtgagttatctcaatt

SEQ ID NO: 26051 - DNA, 21 bp, Artificial Sequence
  synthetic circulating small noncoding RNA (sncRNA) 5' YRNA-derived fragment
cttctcactactacacttgac

SEQ ID NO: 26052 - DNA, 25 bp, Artificial Sequence
  synthetic circulating small noncoding RNA (sncRNA) 5' YRNA-derived fragment
tttcagtcaaatttagcagtggggg

SEQ ID NO: 26053 - DNA, 22 bp, Artificial Sequence
  synthetic circulating small noncoding RNA (sncRNA) 5' YRNA-derived fragment
tcccacttcttcacttgactag

SEQ ID NO: 26054 - DNA, 42 bp, Artificial Sequence
  synthetic circulating small noncoding RNA (sncRNA) 5' YRNA-derived fragment
ctactgtttccccccttctcactactgcacttgactagtcta

SEQ ID NO: 26055 - DNA, 23 bp, Artificial Sequence
  synthetic circulating small noncoding RNA (sncRNA) 5' YRNA-derived fragment
ttctcactactgcacttaactag

SEQ ID NO: 26056 - DNA, 23 bp, Artificial Sequence
  synthetic circulating small noncoding RNA (sncRNA) 5' YRNA-derived fragment
ccagtcagattttagcagtgggg

SEQ ID NO: 26057 - DNA, 19 bp, Artificial Sequence
  synthetic circulating small noncoding RNA (sncRNA) 5' YRNA-derived fragment
accgcgcttgactagcttg

SEQ ID NO: 26058 - DNA, 25 bp, Artificial Sequence
  synthetic circulating small noncoding RNA (sncRNA) 5' YRNA-derived fragment
tatggtagtgggttatcagaactta

SEQ ID NO: 26059 - DNA, 20 bp, Artificial Sequence
  synthetic circulating small noncoding RNA (sncRNA) 5' YRNA-derived fragment
gaagtgggttatcagaactt

SEQ ID NO: 26060 - DNA, 18 bp, Artificial Sequence
  synthetic circulating small noncoding RNA (sncRNA) 5' YRNA-derived fragment
cctaaatttgcctggctt

SEQ ID NO: 26061 - DNA, 26 bp, Artificial Sequence
  synthetic circulating small noncoding RNA (sncRNA) 5' YRNA-derived fragment
ggctggtctgatggtagtgggttatc

SEQ ID NO: 26062 - DNA, 24 bp, Artificial Sequence
  synthetic circulating small noncoding RNA (sncRNA) 5' YRNA-derived fragment
aataagttctgataacccactacc

SEQ ID NO: 26063 - DNA, 20 bp, Artificial Sequence
  synthetic circulating small noncoding RNA (sncRNA) 5' YRNA-derived fragment
actgctaaatttgactaact

SEQ ID NO: 26064 - DNA, 44 bp, Artificial Sequence
  synthetic circulating small noncoding RNA (sncRNA) 5' YRNA-derived fragment
aaggctagtcaagtgaagcagtgggagtggagaaggaacaaaga

SEQ ID NO: 26065 - DNA, 24 bp, Artificial Sequence
  synthetic circulating small noncoding RNA (sncRNA) 5' YRNA-derived fragment
cagccagtcaaatttagcagtggg

SEQ ID NO: 26066 - DNA, 22 bp, Artificial Sequence
  synthetic circulating small noncoding RNA (sncRNA) 5' YRNA-derived fragment
aaaaccagtcaaatttagcagt

SEQ ID NO: 26067 - DNA, 22 bp, Artificial Sequence
  synthetic circulating small noncoding RNA (sncRNA) 5' YRNA-derived fragment
cacagtcagttacagatcgaac

SEQ ID NO: 26068 - DNA, 31 bp, Artificial Sequence
  synthetic circulating small noncoding RNA (sncRNA) 5' YRNA-derived fragment
ggctgggccgaaggtagtgagttatctcgat

SEQ ID NO: 26069 - DNA, 21 bp, Artificial Sequence
  synthetic circulating small noncoding RNA (sncRNA) 5' YRNA-derived fragment
ctccccactgctaaatttgac

SEQ ID NO: 26070 - DNA, 26 bp, Artificial Sequence
  synthetic circulating small noncoding RNA (sncRNA) 5' YRNA-derived fragment
gtgttgtgggttattgttaagttgat

SEQ ID NO: 26071 - DNA, 24 bp, Artificial Sequence
  synthetic circulating small noncoding RNA (sncRNA) 5' YRNA-derived fragment
tctagtcaagtgaagcagtgggag

SEQ ID NO: 26072 - DNA, 30 bp, Artificial Sequence
  synthetic circulating small noncoding RNA (sncRNA) 5' YRNA-derived fragment
aagttctgataacccactaccattggacaa

SEQ ID NO: 26073 - DNA, 39 bp, Artificial Sequence
  synthetic circulating small noncoding RNA (sncRNA) 5' YRNA-derived fragment
tactctttccccccttctcactactgcacttgactagtc

SEQ ID NO: 26074 - DNA, 31 bp, Artificial Sequence
  synthetic circulating small noncoding RNA (sncRNA) 5' YRNA-derived fragment
agccagtcaaatttagcagttgggggttgta

SEQ ID NO: 26075 - DNA, 34 bp, Artificial Sequence
  synthetic circulating small noncoding RNA (sncRNA) 5' YRNA-derived fragment
ggctggtccaatgatagtgggttatcagaactta

SEQ ID NO: 26076 - DNA, 18 bp, Artificial Sequence
  synthetic circulating small noncoding RNA (sncRNA) 5' YRNA-derived fragment
cgagtgttgtgggttatt

SEQ ID NO: 26077 - DNA, 27 bp, Artificial Sequence
  synthetic circulating small noncoding RNA (sncRNA) 5' YRNA-derived fragment
taggctagtcaagtgaagcagtggaaa

SEQ ID NO: 26078 - DNA, 27 bp, Artificial Sequence
  synthetic circulating small noncoding RNA (sncRNA) 5' YRNA-derived fragment
ggtccgatggtagtgggttaccagaac

SEQ ID NO: 26079 - DNA, 28 bp, Artificial Sequence
  synthetic circulating small noncoding RNA (sncRNA) 5' YRNA-derived fragment
agccagtcaaatttagcagtggggggtt

SEQ ID NO: 26080 - DNA, 25 bp, Artificial Sequence
  synthetic circulating small noncoding RNA (sncRNA) 5' YRNA-derived fragment
aaacaccactgcactaggaccagcc

SEQ ID NO: 26081 - DNA, 26 bp, Artificial Sequence
  synthetic circulating small noncoding RNA (sncRNA) 5' YRNA-derived fragment
cttctcactactgcacttgactagtt

SEQ ID NO: 26082 - DNA, 28 bp, Artificial Sequence
  synthetic circulating small noncoding RNA (sncRNA) 5' YRNA-derived fragment
ctgggccgaaggtagtgagttatctcga

SEQ ID NO: 26083 - DNA, 22 bp, Artificial Sequence
  synthetic circulating small noncoding RNA (sncRNA) 5' YRNA-derived fragment
aagccagtcacatttagcagtg

SEQ ID NO: 26084 - DNA, 24 bp, Artificial Sequence
  synthetic circulating small noncoding RNA (sncRNA) 5' YRNA-derived fragment
caatggtagtggtttatcagaact

SEQ ID NO: 26085 - DNA, 25 bp, Artificial Sequence
  synthetic circulating small noncoding RNA (sncRNA) 5' YRNA-derived fragment
aagccagtaaaatttagcagtgggg

SEQ ID NO: 26086 - DNA, 29 bp, Artificial Sequence
  synthetic circulating small noncoding RNA (sncRNA) 5' YRNA-derived fragment
ggtccgatggtagtgggttaccagaactt

SEQ ID NO: 26087 - DNA, 24 bp, Artificial Sequence
  synthetic circulating small noncoding RNA (sncRNA) 5' YRNA-derived fragment
aggctagccaagtgaagcagtggg

SEQ ID NO: 26088 - DNA, 27 bp, Artificial Sequence
  synthetic circulating small noncoding RNA (sncRNA) 5' YRNA-derived fragment
ccactcccactgcttcacttgactagc

SEQ ID NO: 26089 - DNA, 37 bp, Artificial Sequence
  synthetic circulating small noncoding RNA (sncRNA) 5' YRNA-derived fragment
agttcgatctgtaactgactgtgaacaatcaattgag

SEQ ID NO: 26090 - DNA, 23 bp, Artificial Sequence
  synthetic circulating small noncoding RNA (sncRNA) 5' YRNA-derived fragment
gccagtcagattttagcagtggg

SEQ ID NO: 26091 - DNA, 19 bp, Artificial Sequence
  synthetic circulating small noncoding RNA (sncRNA) 5' YRNA-derived fragment
atagtgggttatcagaact

SEQ ID NO: 26092 - DNA, 43 bp, Artificial Sequence
  synthetic circulating small noncoding RNA (sncRNA) 5' YRNA-derived fragment
tctactctttccccccttctcactactgcacttgactagtctt

SEQ ID NO: 26093 - DNA, 25 bp, Artificial Sequence
  synthetic circulating small noncoding RNA (sncRNA) 5' YRNA-derived fragment
cagtcaaatttagcagtggggggtt

SEQ ID NO: 26094 - DNA, 23 bp, Artificial Sequence
  synthetic circulating small noncoding RNA (sncRNA) 5' YRNA-derived fragment
ggctgctccaatggtagtgggtt

SEQ ID NO: 26095 - DNA, 24 bp, Artificial Sequence
  synthetic circulating small noncoding RNA (sncRNA) 5' YRNA-derived fragment
gttctgataacccactaccatcga

SEQ ID NO: 26096 - DNA, 23 bp, Artificial Sequence
  synthetic circulating small noncoding RNA (sncRNA) 5' YRNA-derived fragment
tagtgggttatcagaacttatta

SEQ ID NO: 26097 - DNA, 33 bp, Artificial Sequence
  synthetic circulating small noncoding RNA (sncRNA) 5' YRNA-derived fragment
tgttaataagttctgataacccactaccatcgg

SEQ ID NO: 26098 - DNA, 24 bp, Artificial Sequence
  synthetic circulating small noncoding RNA (sncRNA) 5' YRNA-derived fragment
ccactcccactgcttcacttgact

SEQ ID NO: 26099 - DNA, 29 bp, Artificial Sequence
  synthetic circulating small noncoding RNA (sncRNA) 5' YRNA-derived fragment
aagttctgataacctactaccatcggacc

SEQ ID NO: 26100 - DNA, 31 bp, Artificial Sequence
  synthetic circulating small noncoding RNA (sncRNA) 5' YRNA-derived fragment
ggctggtccaaagggagtgagttatctcatt

SEQ ID NO: 26101 - DNA, 28 bp, Artificial Sequence
  synthetic circulating small noncoding RNA (sncRNA) 5' YRNA-derived fragment
ctagtcaagtgaagcagtgggagtggag

SEQ ID NO: 26102 - DNA, 44 bp, Artificial Sequence
  synthetic circulating small noncoding RNA (sncRNA) 5' YRNA-derived fragment
tagttgttccttctccactcccactgcttcacttgactagcctt

SEQ ID NO: 26103 - DNA, 20 bp, Artificial Sequence
  synthetic circulating small noncoding RNA (sncRNA) 5' YRNA-derived fragment
cagatttctttgttccttct

SEQ ID NO: 26104 - DNA, 26 bp, Artificial Sequence
  synthetic circulating small noncoding RNA (sncRNA) 5' YRNA-derived fragment
ccccccacaactaaatttgactggct

SEQ ID NO: 26105 - DNA, 23 bp, Artificial Sequence
  synthetic circulating small noncoding RNA (sncRNA) 5' YRNA-derived fragment
ctagtaaagtgcagtagtgagaa

SEQ ID NO: 26106 - DNA, 27 bp, Artificial Sequence
  synthetic circulating small noncoding RNA (sncRNA) 5' YRNA-derived fragment
ggctggtccgatggtagcgggttatca

SEQ ID NO: 26107 - DNA, 32 bp, Artificial Sequence
  synthetic circulating small noncoding RNA (sncRNA) 5' YRNA-derived fragment
acagatttctttgttccttctccactcccact

SEQ ID NO: 26108 - DNA, 32 bp, Artificial Sequence
  synthetic circulating small noncoding RNA (sncRNA) 5' YRNA-derived fragment
aattgagataactcactaccctcagactagcc

SEQ ID NO: 26109 - DNA, 24 bp, Artificial Sequence
  synthetic circulating small noncoding RNA (sncRNA) 5' YRNA-derived fragment
tataccaactttagtgacactaat

SEQ ID NO: 26110 - DNA, 37 bp, Artificial Sequence
  synthetic circulating small noncoding RNA (sncRNA) 5' YRNA-derived fragment
tatacaaccccccactgctaaatttgactggcttttt

SEQ ID NO: 26111 - DNA, 32 bp, Artificial Sequence
  synthetic circulating small noncoding RNA (sncRNA) 5' YRNA-derived fragment
aattgagataactcactaccttcagaccagtc

SEQ ID NO: 26112 - DNA, 33 bp, Artificial Sequence
  synthetic circulating small noncoding RNA (sncRNA) 5' YRNA-derived fragment
ccccccttctcactactgcacttgactagtctt

SEQ ID NO: 26113 - DNA, 19 bp, Artificial Sequence
  synthetic circulating small noncoding RNA (sncRNA) 5' YRNA-derived fragment
agctctgacaacccactac

SEQ ID NO: 26114 - DNA, 36 bp, Artificial Sequence
  synthetic circulating small noncoding RNA (sncRNA) 5' YRNA-derived fragment
tttgactagtcaagtgaagcagtgggagtggagaag

SEQ ID NO: 26115 - DNA, 31 bp, Artificial Sequence
  synthetic circulating small noncoding RNA (sncRNA) 5' YRNA-derived fragment
cggctggtccgagtgcagtggtgtttacaac

SEQ ID NO: 26116 - DNA, 26 bp, Artificial Sequence
  synthetic circulating small noncoding RNA (sncRNA) 5' YRNA-derived fragment
ggactagtcaagtgcagtagtgagca

SEQ ID NO: 26117 - DNA, 30 bp, Artificial Sequence
  synthetic circulating small noncoding RNA (sncRNA) 5' YRNA-derived fragment
tgctggtccaagtgcagtggtgtttacaac

SEQ ID NO: 26118 - DNA, 19 bp, Artificial Sequence
  synthetic circulating small noncoding RNA (sncRNA) 5' YRNA-derived fragment
cagctaaatttgactggct

SEQ ID NO: 26119 - DNA, 37 bp, Artificial Sequence
  synthetic circulating small noncoding RNA (sncRNA) 5' YRNA-derived fragment
ttctccactcccactgcttcacttgactagcctttta

SEQ ID NO: 26120 - DNA, 22 bp, Artificial Sequence
  synthetic circulating small noncoding RNA (sncRNA) 5' YRNA-derived fragment
gtcaaatttagcagtggggggt

SEQ ID NO: 26121 - DNA, 26 bp, Artificial Sequence
  synthetic circulating small noncoding RNA (sncRNA) 5' YRNA-derived fragment
aaggctagtcaagtgaagcagtggaa

SEQ ID NO: 26122 - DNA, 35 bp, Artificial Sequence
  synthetic circulating small noncoding RNA (sncRNA) 5' YRNA-derived fragment
tttcagccagtcaaatttagcagtggggggttgta

SEQ ID NO: 26123 - DNA, 32 bp, Artificial Sequence
  synthetic circulating small noncoding RNA (sncRNA) 5' YRNA-derived fragment
gactagtcctgtggtagtgggttatcagaact

SEQ ID NO: 26124 - DNA, 21 bp, Artificial Sequence
  synthetic circulating small noncoding RNA (sncRNA) 5' YRNA-derived fragment
aagccagttaactttagcagt

SEQ ID NO: 26125 - DNA, 26 bp, Artificial Sequence
  synthetic circulating small noncoding RNA (sncRNA) 5' YRNA-derived fragment
tcccgctgcttcacttgactagccta

SEQ ID NO: 26126 - DNA, 25 bp, Artificial Sequence
  synthetic circulating small noncoding RNA (sncRNA) 5' YRNA-derived fragment
aacaaggagttcgatctgtaacaga

SEQ ID NO: 26127 - DNA, 31 bp, Artificial Sequence
  synthetic circulating small noncoding RNA (sncRNA) 5' YRNA-derived fragment
agctggtctgatggtagtgggttatcaggac

SEQ ID NO: 26128 - DNA, 32 bp, Artificial Sequence
  synthetic circulating small noncoding RNA (sncRNA) 5' YRNA-derived fragment
ggctagtctgaaggtagtgagttctctcaatt

SEQ ID NO: 26129 - DNA, 37 bp, Artificial Sequence
  synthetic circulating small noncoding RNA (sncRNA) 5' YRNA-derived fragment
ggttatcagaacttattaacattagtgtcactaaagt

SEQ ID NO: 26130 - DNA, 24 bp, Artificial Sequence
  synthetic circulating small noncoding RNA (sncRNA) 5' YRNA-derived fragment
agtgttgtgggttattgttaagtt

SEQ ID NO: 26131 - DNA, 26 bp, Artificial Sequence
  synthetic circulating small noncoding RNA (sncRNA) 5' YRNA-derived fragment
ttctcactactgcacttaactagtct

SEQ ID NO: 26132 - DNA, 30 bp, Artificial Sequence
  synthetic circulating small noncoding RNA (sncRNA) 5' YRNA-derived fragment
cactcccactgcttcacttgactagcctta

SEQ ID NO: 26133 - DNA, 43 bp, Artificial Sequence
  synthetic circulating small noncoding RNA (sncRNA) 5' YRNA-derived fragment
actaaagttggtatacaaccccccactgctaaatttgactggc

SEQ ID NO: 26134 - DNA, 20 bp, Artificial Sequence
  synthetic circulating small noncoding RNA (sncRNA) 5' YRNA-derived fragment
cactgcttcacttgactagt

SEQ ID NO: 26135 - DNA, 22 bp, Artificial Sequence
  synthetic circulating small noncoding RNA (sncRNA) 5' YRNA-derived fragment
tctcactactgcacttgactag

SEQ ID NO: 26136 - DNA, 19 bp, Artificial Sequence
  synthetic circulating small noncoding RNA (sncRNA) 5' YRNA-derived fragment
caagccagtcaaatttagc

SEQ ID NO: 26137 - DNA, 34 bp, Artificial Sequence
  synthetic circulating small noncoding RNA (sncRNA) 5' YRNA-derived fragment
ggctggtctgatggtagtgggttatcagaactta

SEQ ID NO: 26138 - DNA, 20 bp, Artificial Sequence
  synthetic circulating small noncoding RNA (sncRNA) 5' YRNA-derived fragment
ccagtcaaatttagcagtgg

SEQ ID NO: 26139 - DNA, 26 bp, Artificial Sequence
  synthetic circulating small noncoding RNA (sncRNA) 5' YRNA-derived fragment
gatgacccactaccatcggaccagcc

SEQ ID NO: 26140 - DNA, 23 bp, Artificial Sequence
  synthetic circulating small noncoding RNA (sncRNA) 5' YRNA-derived fragment
gatggcagtgggttatcagaact

SEQ ID NO: 26141 - DNA, 25 bp, Artificial Sequence
  synthetic circulating small noncoding RNA (sncRNA) 5' YRNA-derived fragment
ggcttgtccgagtgcagtggtgttt

SEQ ID NO: 26142 - DNA, 28 bp, Artificial Sequence
  synthetic circulating small noncoding RNA (sncRNA) 5' YRNA-derived fragment
gctctgacaacccactaccatcggacca

SEQ ID NO: 26143 - DNA, 18 bp, Artificial Sequence
  synthetic circulating small noncoding RNA (sncRNA) 5' YRNA-derived fragment
cattagtgtcactaacgt

SEQ ID NO: 26144 - DNA, 19 bp, Artificial Sequence
  synthetic circulating small noncoding RNA (sncRNA) 5' YRNA-derived fragment
cccccacaaccgcgcttga

SEQ ID NO: 26145 - DNA, 37 bp, Artificial Sequence
  synthetic circulating small noncoding RNA (sncRNA) 5' YRNA-derived fragment
gactagtcaagtgaagcagtgggagtggagaaggaac

SEQ ID NO: 26146 - DNA, 37 bp, Artificial Sequence
  synthetic circulating small noncoding RNA (sncRNA) 5' YRNA-derived fragment
tggtatacaaccccccactgctaaatttgactggctt

SEQ ID NO: 26147 - DNA, 18 bp, Artificial Sequence
  synthetic circulating small noncoding RNA (sncRNA) 5' YRNA-derived fragment
ggcttttccgatggtagt

SEQ ID NO: 26148 - DNA, 38 bp, Artificial Sequence
  synthetic circulating small noncoding RNA (sncRNA) 5' YRNA-derived fragment
ggctggtcctatggtagtgggttatcagaacttattaa

SEQ ID NO: 26149 - DNA, 23 bp, Artificial Sequence
  synthetic circulating small noncoding RNA (sncRNA) 5' YRNA-derived fragment
aactcactaccttcggaccagct

SEQ ID NO: 26150 - DNA, 23 bp, Artificial Sequence
  synthetic circulating small noncoding RNA (sncRNA) 5' YRNA-derived fragment
aaccagtcaaatttagcagtggg

SEQ ID NO: 26151 - DNA, 23 bp, Artificial Sequence
  synthetic circulating small noncoding RNA (sncRNA) 5' YRNA-derived fragment
cagaacttattaacattagtgtc

SEQ ID NO: 26152 - DNA, 26 bp, Artificial Sequence
  synthetic circulating small noncoding RNA (sncRNA) 5' YRNA-derived fragment
ttctcactactgcacttggctagtct

SEQ ID NO: 26153 - DNA, 41 bp, Artificial Sequence
  synthetic circulating small noncoding RNA (sncRNA) 5' YRNA-derived fragment
gctggtcctatggtagtgggttatcagaacttattaacttt

SEQ ID NO: 26154 - DNA, 27 bp, Artificial Sequence
  synthetic circulating small noncoding RNA (sncRNA) 5' YRNA-derived fragment
aagccagtcaaggttagcagtgggagg

SEQ ID NO: 26155 - DNA, 30 bp, Artificial Sequence
  synthetic circulating small noncoding RNA (sncRNA) 5' YRNA-derived fragment
ttgagataactcactgccttcagaccagcc

SEQ ID NO: 26156 - DNA, 43 bp, Artificial Sequence
  synthetic circulating small noncoding RNA (sncRNA) 5' YRNA-derived fragment
ctttgttccttctccactcccactgcttcacttgactagccta

SEQ ID NO: 26157 - DNA, 28 bp, Artificial Sequence
  synthetic circulating small noncoding RNA (sncRNA) 5' YRNA-derived fragment
tgctagtctgatggtagtgggttatcag

SEQ ID NO: 26158 - DNA, 24 bp, Artificial Sequence
  synthetic circulating small noncoding RNA (sncRNA) 5' YRNA-derived fragment
cttctcactactgcccttgactag

SEQ ID NO: 26159 - DNA, 29 bp, Artificial Sequence
  synthetic circulating small noncoding RNA (sncRNA) 5' YRNA-derived fragment
ctagtcaagtgcagtagtgagaagggggg

SEQ ID NO: 26160 - DNA, 36 bp, Artificial Sequence
  synthetic circulating small noncoding RNA (sncRNA) 5' YRNA-derived fragment
ctccttgttctactctttccccccttctcactactg

SEQ ID NO: 26161 - DNA, 26 bp, Artificial Sequence
  synthetic circulating small noncoding RNA (sncRNA) 5' YRNA-derived fragment
aaccagtcaaatttagcagtaggggg

SEQ ID NO: 26162 - DNA, 18 bp, Artificial Sequence
  synthetic circulating small noncoding RNA (sncRNA) 5' YRNA-derived fragment
gtagtgggttatcagaat

SEQ ID NO: 26163 - DNA, 22 bp, Artificial Sequence
  synthetic circulating small noncoding RNA (sncRNA) 5' YRNA-derived fragment
attgagataactcactaccttc

SEQ ID NO: 26164 - DNA, 22 bp, Artificial Sequence
  synthetic circulating small noncoding RNA (sncRNA) 5' YRNA-derived fragment
aataagttctgataacctacta

SEQ ID NO: 26165 - DNA, 29 bp, Artificial Sequence
  synthetic circulating small noncoding RNA (sncRNA) 5' YRNA-derived fragment
ttgatttaacattgtctccccccacaacc

SEQ ID NO: 26166 - DNA, 28 bp, Artificial Sequence
  synthetic circulating small noncoding RNA (sncRNA) 5' YRNA-derived fragment
tataccaactttagtgacactaatgtta

SEQ ID NO: 26167 - DNA, 36 bp, Artificial Sequence
  synthetic circulating small noncoding RNA (sncRNA) 5' YRNA-derived fragment
ttctccactcccactgcttcacttgactagcctttt

SEQ ID NO: 26168 - DNA, 30 bp, Artificial Sequence
  synthetic circulating small noncoding RNA (sncRNA) 5' YRNA-derived fragment
ttctgatgacccactaccatcggaccagcc

SEQ ID NO: 26169 - DNA, 34 bp, Artificial Sequence
  synthetic circulating small noncoding RNA (sncRNA) 5' YRNA-derived fragment
caggctagtcaagtgaagcagtgggagtggggaa

SEQ ID NO: 26170 - DNA, 35 bp, Artificial Sequence
  synthetic circulating small noncoding RNA (sncRNA) 5' YRNA-derived fragment
ggctggtccgatggtagtgatttatcagaacttat

SEQ ID NO: 26171 - DNA, 30 bp, Artificial Sequence
  synthetic circulating small noncoding RNA (sncRNA) 5' YRNA-derived fragment
tgagttctgataacccactaccatcggacc

SEQ ID NO: 26172 - DNA, 31 bp, Artificial Sequence
  synthetic circulating small noncoding RNA (sncRNA) 5' YRNA-derived fragment
gactagtcaagtgaagcagtgggagtggaga

SEQ ID NO: 26173 - DNA, 25 bp, Artificial Sequence
  synthetic circulating small noncoding RNA (sncRNA) 5' YRNA-derived fragment
gactagtcaagtgcagtagtgagca

SEQ ID NO: 26174 - DNA, 38 bp, Artificial Sequence
  synthetic circulating small noncoding RNA (sncRNA) 5' YRNA-derived fragment
actagtcaagtgaagcagtgggagtggagaaggaacaa

SEQ ID NO: 26175 - DNA, 30 bp, Artificial Sequence
  synthetic circulating small noncoding RNA (sncRNA) 5' YRNA-derived fragment
tgtctccccccacaaccgcgcttgactagc

SEQ ID NO: 26176 - DNA, 25 bp, Artificial Sequence
  synthetic circulating small noncoding RNA (sncRNA) 5' YRNA-derived fragment
cccccattgctaaatttgactggct

SEQ ID NO: 26177 - DNA, 28 bp, Artificial Sequence
  synthetic circulating small noncoding RNA (sncRNA) 5' YRNA-derived fragment
tggtccgatggtagtgatttatcagaac

SEQ ID NO: 26178 - DNA, 18 bp, Artificial Sequence
  synthetic circulating small noncoding RNA (sncRNA) 5' YRNA-derived fragment
aagtgggttatcagaact

SEQ ID NO: 26179 - DNA, 22 bp, Artificial Sequence
  synthetic circulating small noncoding RNA (sncRNA) 5' YRNA-derived fragment
gactggtccgaaggtagtgagt

SEQ ID NO: 26180 - DNA, 34 bp, Artificial Sequence
  synthetic circulating small noncoding RNA (sncRNA) 5' YRNA-derived fragment
aaacaatcaattgagataactcactaacttcgga

SEQ ID NO: 26181 - DNA, 32 bp, Artificial Sequence
  synthetic circulating small noncoding RNA (sncRNA) 5' YRNA-derived fragment
ttggtccgagtgttgtgggttattgttaagtt

SEQ ID NO: 26182 - DNA, 34 bp, Artificial Sequence
  synthetic circulating small noncoding RNA (sncRNA) 5' YRNA-derived fragment
cagtcaaatttagcagtggggggttgtataccaa

SEQ ID NO: 26183 - DNA, 18 bp, Artificial Sequence
  synthetic circulating small noncoding RNA (sncRNA) 5' YRNA-derived fragment
ttctcactactgcacttg

SEQ ID NO: 26184 - DNA, 33 bp, Artificial Sequence
  synthetic circulating small noncoding RNA (sncRNA) 5' YRNA-derived fragment
cagtgggagtggagaaggaacaaagaaatctgt

SEQ ID NO: 26185 - DNA, 18 bp, Artificial Sequence
  synthetic circulating small noncoding RNA (sncRNA) 5' YRNA-derived fragment
gataacccactaccatcg

SEQ ID NO: 26186 - DNA, 19 bp, Artificial Sequence
  synthetic circulating small noncoding RNA (sncRNA) 5' YRNA-derived fragment
actgcttcacttgactaga

SEQ ID NO: 26187 - DNA, 20 bp, Artificial Sequence
  synthetic circulating small noncoding RNA (sncRNA) 5' YRNA-derived fragment
ctagtcaagtgaagcagtgg

SEQ ID NO: 26188 - DNA, 29 bp, Artificial Sequence
  synthetic circulating small noncoding RNA (sncRNA) 5' YRNA-derived fragment
tagtctgatggtagtgggttatcagaact

SEQ ID NO: 26189 - DNA, 22 bp, Artificial Sequence
  synthetic circulating small noncoding RNA (sncRNA) 5' YRNA-derived fragment
gccattcaaatttagcagtggg

SEQ ID NO: 26190 - DNA, 31 bp, Artificial Sequence
  synthetic circulating small noncoding RNA (sncRNA) 5' YRNA-derived fragment
ggtccgatggtagtgggttaccagaacttaa

SEQ ID NO: 26191 - DNA, 32 bp, Artificial Sequence
  synthetic circulating small noncoding RNA (sncRNA) 5' YRNA-derived fragment
agttgagataactcactacctttggaccagcc

SEQ ID NO: 26192 - DNA, 24 bp, Artificial Sequence
  synthetic circulating small noncoding RNA (sncRNA) 5' YRNA-derived fragment
cctagtcaagtgcagtagtgagaa

SEQ ID NO: 26193 - DNA, 25 bp, Artificial Sequence
  synthetic circulating small noncoding RNA (sncRNA) 5' YRNA-derived fragment
cattagtgtcactaaagttggtata

SEQ ID NO: 26194 - DNA, 28 bp, Artificial Sequence
  synthetic circulating small noncoding RNA (sncRNA) 5' YRNA-derived fragment
cctcccactgctaaatttgactggctta

SEQ ID NO: 26195 - DNA, 29 bp, Artificial Sequence
  synthetic circulating small noncoding RNA (sncRNA) 5' YRNA-derived fragment
tgagataactcactacctttggacaagcc

SEQ ID NO: 26196 - DNA, 20 bp, Artificial Sequence
  synthetic circulating small noncoding RNA (sncRNA) 5' YRNA-derived fragment
ccttctcactactgcacttg

SEQ ID NO: 26197 - DNA, 25 bp, Artificial Sequence
  synthetic circulating small noncoding RNA (sncRNA) 5' YRNA-derived fragment
ggcttgtctgatggtagtgggttat

SEQ ID NO: 26198 - DNA, 27 bp, Artificial Sequence
  synthetic circulating small noncoding RNA (sncRNA) 5' YRNA-derived fragment
agattagtcaagtgcagtagtgagaag

SEQ ID NO: 26199 - DNA, 32 bp, Artificial Sequence
  synthetic circulating small noncoding RNA (sncRNA) 5' YRNA-derived fragment
gggctagtcaagtgaagcagtgggagtggaga

SEQ ID NO: 26200 - DNA, 30 bp, Artificial Sequence
  synthetic circulating small noncoding RNA (sncRNA) 5' YRNA-derived fragment
gactagtcaagtgaagcagtgggagtggag

SEQ ID NO: 26201 - DNA, 36 bp, Artificial Sequence
  synthetic circulating small noncoding RNA (sncRNA) 5' YRNA-derived fragment
ttaagccagtcaaatttagcagttgggggttgtata

SEQ ID NO: 26202 - DNA, 21 bp, Artificial Sequence
  synthetic circulating small noncoding RNA (sncRNA) 5' YRNA-derived fragment
ccccccactgctaaattttac

SEQ ID NO: 26203 - DNA, 20 bp, Artificial Sequence
  synthetic circulating small noncoding RNA (sncRNA) 5' YRNA-derived fragment
gtgggttatcagaacttatt

SEQ ID NO: 26204 - DNA, 20 bp, Artificial Sequence
  synthetic circulating small noncoding RNA (sncRNA) 5' YRNA-derived fragment
ccactgctaaatttgactgg

SEQ ID NO: 26205 - DNA, 24 bp, Artificial Sequence
  synthetic circulating small noncoding RNA (sncRNA) 5' YRNA-derived fragment
cagatcgaactccttgttctactc

SEQ ID NO: 26206 - DNA, 24 bp, Artificial Sequence
  synthetic circulating small noncoding RNA (sncRNA) 5' YRNA-derived fragment
tgttaataagttctgataacccac

SEQ ID NO: 26207 - DNA, 38 bp, Artificial Sequence
  synthetic circulating small noncoding RNA (sncRNA) 5' YRNA-derived fragment
cagtcaaatttagcagtggggggttgtataccaacttt

SEQ ID NO: 26208 - DNA, 31 bp, Artificial Sequence
  synthetic circulating small noncoding RNA (sncRNA) 5' YRNA-derived fragment
gcttgtctgatggtagtgggttatcagaact

SEQ ID NO: 26209 - DNA, 31 bp, Artificial Sequence
  synthetic circulating small noncoding RNA (sncRNA) 5' YRNA-derived fragment
agctggttcgatggcagtgggttatcagaac

SEQ ID NO: 26210 - DNA, 21 bp, Artificial Sequence
  synthetic circulating small noncoding RNA (sncRNA) 5' YRNA-derived fragment
agtcaaatttagcagtggggg

SEQ ID NO: 26211 - DNA, 29 bp, Artificial Sequence
  synthetic circulating small noncoding RNA (sncRNA) 5' YRNA-derived fragment
cttaagccagtcaaatttagcagtggggg

SEQ ID NO: 26212 - DNA, 21 bp, Artificial Sequence
  synthetic circulating small noncoding RNA (sncRNA) 5' YRNA-derived fragment
ataagttctgataacccacta

SEQ ID NO: 26213 - DNA, 23 bp, Artificial Sequence
  synthetic circulating small noncoding RNA (sncRNA) 5' YRNA-derived fragment
agtcaaatttagcagtggggggt

SEQ ID NO: 26214 - DNA, 29 bp, Artificial Sequence
  synthetic circulating small noncoding RNA (sncRNA) 5' YRNA-derived fragment
aaggctagtcaagggaagcagtgggagtg

SEQ ID NO: 26215 - DNA, 29 bp, Artificial Sequence
  synthetic circulating small noncoding RNA (sncRNA) 5' YRNA-derived fragment
gactagtcaagtgtagtagtgagaagggg

SEQ ID NO: 26216 - DNA, 26 bp, Artificial Sequence
  synthetic circulating small noncoding RNA (sncRNA) 5' YRNA-derived fragment
gataacccaccaccattggaccagcc

SEQ ID NO: 26217 - DNA, 20 bp, Artificial Sequence
  synthetic circulating small noncoding RNA (sncRNA) 5' YRNA-derived fragment
actaatgttaataagttctg

SEQ ID NO: 26218 - DNA, 19 bp, Artificial Sequence
  synthetic circulating small noncoding RNA (sncRNA) 5' YRNA-derived fragment
aacgccagtcaaatttagc

SEQ ID NO: 26219 - DNA, 30 bp, Artificial Sequence
  synthetic circulating small noncoding RNA (sncRNA) 5' YRNA-derived fragment
gttctgataacccactaccattggaccagc

SEQ ID NO: 26220 - DNA, 34 bp, Artificial Sequence
  synthetic circulating small noncoding RNA (sncRNA) 5' YRNA-derived fragment
gaacaatcaattgagataactcactaccttcgga

SEQ ID NO: 26221 - DNA, 31 bp, Artificial Sequence
  synthetic circulating small noncoding RNA (sncRNA) 5' YRNA-derived fragment
gttgagataactccctaccttcgggccagcc

SEQ ID NO: 26222 - DNA, 31 bp, Artificial Sequence
  synthetic circulating small noncoding RNA (sncRNA) 5' YRNA-derived fragment
cagttggtccgagtgttgtgggttattgtta

SEQ ID NO: 26223 - DNA, 34 bp, Artificial Sequence
  synthetic circulating small noncoding RNA (sncRNA) 5' YRNA-derived fragment
ttttccactcccactgcttcacttgactagcctt

SEQ ID NO: 26224 - DNA, 33 bp, Artificial Sequence
  synthetic circulating small noncoding RNA (sncRNA) 5' YRNA-derived fragment
acagatttctttgttccttctccactcccactg

SEQ ID NO: 26225 - DNA, 36 bp, Artificial Sequence
  synthetic circulating small noncoding RNA (sncRNA) 5' YRNA-derived fragment
aataagttctgataacccactaccatcagaccagcc

SEQ ID NO: 26226 - DNA, 24 bp, Artificial Sequence
  synthetic circulating small noncoding RNA (sncRNA) 5' YRNA-derived fragment
aagccagtcaaatttagcagtagg

SEQ ID NO: 26227 - DNA, 30 bp, Artificial Sequence
  synthetic circulating small noncoding RNA (sncRNA) 5' YRNA-derived fragment
tttcagccagtcaaatttagcagtgggggg

SEQ ID NO: 26228 - DNA, 23 bp, Artificial Sequence
  synthetic circulating small noncoding RNA (sncRNA) 5' YRNA-derived fragment
gcagtgggttatcagaacttatt

SEQ ID NO: 26229 - DNA, 22 bp, Artificial Sequence
  synthetic circulating small noncoding RNA (sncRNA) 5' YRNA-derived fragment
tatggtagtgggttatcagaac

SEQ ID NO: 26230 - DNA, 26 bp, Artificial Sequence
  synthetic circulating small noncoding RNA (sncRNA) 5' YRNA-derived fragment
aaaccagtcaaatttagcagtagggg

SEQ ID NO: 26231 - DNA, 26 bp, Artificial Sequence
  synthetic circulating small noncoding RNA (sncRNA) 5' YRNA-derived fragment
ggctggtccgaaggtaaggagttatc

SEQ ID NO: 26232 - DNA, 20 bp, Artificial Sequence
  synthetic circulating small noncoding RNA (sncRNA) 5' YRNA-derived fragment
agttctgataacccactatc

SEQ ID NO: 26233 - DNA, 26 bp, Artificial Sequence
  synthetic circulating small noncoding RNA (sncRNA) 5' YRNA-derived fragment
cttctcactactgcacttgactaaaa

SEQ ID NO: 26234 - DNA, 25 bp, Artificial Sequence
  synthetic circulating small noncoding RNA (sncRNA) 5' YRNA-derived fragment
ctcccactgcttcacttgactagac

SEQ ID NO: 26235 - DNA, 31 bp, Artificial Sequence
  synthetic circulating small noncoding RNA (sncRNA) 5' YRNA-derived fragment
gttctgataacccattaccattggaccagct

SEQ ID NO: 26236 - DNA, 31 bp, Artificial Sequence
  synthetic circulating small noncoding RNA (sncRNA) 5' YRNA-derived fragment
ggctggtctgaaggtagtgagctatctcaat

SEQ ID NO: 26237 - DNA, 22 bp, Artificial Sequence
  synthetic circulating small noncoding RNA (sncRNA) 5' YRNA-derived fragment
tgttgtgggttattgttaagtt

SEQ ID NO: 26238 - DNA, 27 bp, Artificial Sequence
  synthetic circulating small noncoding RNA (sncRNA) 5' YRNA-derived fragment
tacactgtcaaatttagcagtgagggg

SEQ ID NO: 26239 - DNA, 23 bp, Artificial Sequence
  synthetic circulating small noncoding RNA (sncRNA) 5' YRNA-derived fragment
tctagtcaagtgaagcagtggga

SEQ ID NO: 26240 - DNA, 25 bp, Artificial Sequence
  synthetic circulating small noncoding RNA (sncRNA) 5' YRNA-derived fragment
aggctagtcaagtgaggaactggga

SEQ ID NO: 26241 - DNA, 31 bp, Artificial Sequence
  synthetic circulating small noncoding RNA (sncRNA) 5' YRNA-derived fragment
tccactcccactgcttcacttgactagccta

SEQ ID NO: 26242 - DNA, 25 bp, Artificial Sequence
  synthetic circulating small noncoding RNA (sncRNA) 5' YRNA-derived fragment
aattctgataacccactaccatcag

SEQ ID NO: 26243 - DNA, 22 bp, Artificial Sequence
  synthetic circulating small noncoding RNA (sncRNA) 5' YRNA-derived fragment
actcccactgcttcatttgact

SEQ ID NO: 26244 - DNA, 20 bp, Artificial Sequence
  synthetic circulating small noncoding RNA (sncRNA) 5' YRNA-derived fragment
aagccagtcaaggttagcag

SEQ ID NO: 26245 - DNA, 23 bp, Artificial Sequence
  synthetic circulating small noncoding RNA (sncRNA) 5' YRNA-derived fragment
ctcccactgcttcacttggctag

SEQ ID NO: 26246 - DNA, 28 bp, Artificial Sequence
  synthetic circulating small noncoding RNA (sncRNA) 5' YRNA-derived fragment
tgagataactcactaccttcggaccagc

SEQ ID NO: 26247 - DNA, 22 bp, Artificial Sequence
  synthetic circulating small noncoding RNA (sncRNA) 5' YRNA-derived fragment
gttacagatcgaactccttgtt

SEQ ID NO: 26248 - DNA, 24 bp, Artificial Sequence
  synthetic circulating small noncoding RNA (sncRNA) 5' YRNA-derived fragment
agttctgataacccactaccatcc

SEQ ID NO: 26249 - DNA, 25 bp, Artificial Sequence
  synthetic circulating small noncoding RNA (sncRNA) 5' YRNA-derived fragment
actcccactgcttcacttgactaga

SEQ ID NO: 26250 - DNA, 22 bp, Artificial Sequence
  synthetic circulating small noncoding RNA (sncRNA) 5' YRNA-derived fragment
tcacagtcagttacagatcgaa

SEQ ID NO: 26251 - DNA, 30 bp, Artificial Sequence
  synthetic circulating small noncoding RNA (sncRNA) 5' YRNA-derived fragment
cttctcactactgcacttgactagtcttta

SEQ ID NO: 26252 - DNA, 30 bp, Artificial Sequence
  synthetic circulating small noncoding RNA (sncRNA) 5' YRNA-derived fragment
ctccattcccactgcttcacttgactagtt

SEQ ID NO: 26253 - DNA, 35 bp, Artificial Sequence
  synthetic circulating small noncoding RNA (sncRNA) 5' YRNA-derived fragment
aataagttctgataacccactaccattggaccacc

SEQ ID NO: 26254 - DNA, 22 bp, Artificial Sequence
  synthetic circulating small noncoding RNA (sncRNA) 5' YRNA-derived fragment
gctagtcaagggaagcagtggg

SEQ ID NO: 26255 - DNA, 21 bp, Artificial Sequence
  synthetic circulating small noncoding RNA (sncRNA) 5' YRNA-derived fragment
gccagtcagattttagcagtg

SEQ ID NO: 26256 - DNA, 20 bp, Artificial Sequence
  synthetic circulating small noncoding RNA (sncRNA) 5' YRNA-derived fragment
tgtaactgactgtgaacaat

SEQ ID NO: 26257 - DNA, 25 bp, Artificial Sequence
  synthetic circulating small noncoding RNA (sncRNA) 5' YRNA-derived fragment
aggctagtcaagggaagcagtggga

SEQ ID NO: 26258 - DNA, 27 bp, Artificial Sequence
  synthetic circulating small noncoding RNA (sncRNA) 5' YRNA-derived fragment
tacactagtcaagtgcagtagtgagaa

SEQ ID NO: 26259 - DNA, 25 bp, Artificial Sequence
  synthetic circulating small noncoding RNA (sncRNA) 5' YRNA-derived fragment
cctagtcaagtgcagtagtgagaag

SEQ ID NO: 26260 - DNA, 29 bp, Artificial Sequence
  synthetic circulating small noncoding RNA (sncRNA) 5' YRNA-derived fragment
tctgataacccactactatcggaccagcc

SEQ ID NO: 26261 - DNA, 30 bp, Artificial Sequence
  synthetic circulating small noncoding RNA (sncRNA) 5' YRNA-derived fragment
ctttagtgacactaatgttaataagttctg

SEQ ID NO: 26262 - DNA, 20 bp, Artificial Sequence
  synthetic circulating small noncoding RNA (sncRNA) 5' YRNA-derived fragment
tctgataacccactaccatc

SEQ ID NO: 26263 - DNA, 27 bp, Artificial Sequence
  synthetic circulating small noncoding RNA (sncRNA) 5' YRNA-derived fragment
gtacaatggtagtgggttatcagaact

SEQ ID NO: 26264 - DNA, 29 bp, Artificial Sequence
  synthetic circulating small noncoding RNA (sncRNA) 5' YRNA-derived fragment
cttctcactactgcacttgactagtctaa

SEQ ID NO: 26265 - DNA, 40 bp, Artificial Sequence
  synthetic circulating small noncoding RNA (sncRNA) 5' YRNA-derived fragment
gccagtcaaatttagcagtggggggttgtataccaacttt

SEQ ID NO: 26266 - DNA, 25 bp, Artificial Sequence
  synthetic circulating small noncoding RNA (sncRNA) 5' YRNA-derived fragment
tcccactgcttcacttgactggcct

SEQ ID NO: 26267 - DNA, 26 bp, Artificial Sequence
  synthetic circulating small noncoding RNA (sncRNA) 5' YRNA-derived fragment
aagcctgtcaattttagcagtggggg

SEQ ID NO: 26268 - DNA, 19 bp, Artificial Sequence
  synthetic circulating small noncoding RNA (sncRNA) 5' YRNA-derived fragment
gactggtccgaaggtagtg

SEQ ID NO: 26269 - DNA, 25 bp, Artificial Sequence
  synthetic circulating small noncoding RNA (sncRNA) 5' YRNA-derived fragment
ccgatggtagcaggttatcagaact

SEQ ID NO: 26270 - DNA, 22 bp, Artificial Sequence
  synthetic circulating small noncoding RNA (sncRNA) 5' YRNA-derived fragment
tagtcaagtgaagcagtgggag

SEQ ID NO: 26271 - DNA, 33 bp, Artificial Sequence
  synthetic circulating small noncoding RNA (sncRNA) 5' YRNA-derived fragment
gactagtcaagtgcagtagtgagaaggggggaa

SEQ ID NO: 26272 - DNA, 29 bp, Artificial Sequence
  synthetic circulating small noncoding RNA (sncRNA) 5' YRNA-derived fragment
ttctgataacccactaccatcgaaccagc

SEQ ID NO: 26273 - DNA, 26 bp, Artificial Sequence
  synthetic circulating small noncoding RNA (sncRNA) 5' YRNA-derived fragment
ttctcactactgcagttgactagtct

SEQ ID NO: 26274 - DNA, 39 bp, Artificial Sequence
  synthetic circulating small noncoding RNA (sncRNA) 5' YRNA-derived fragment
actaataagttctgataacccactaccattggaccaggc

SEQ ID NO: 26275 - DNA, 36 bp, Artificial Sequence
  synthetic circulating small noncoding RNA (sncRNA) 5' YRNA-derived fragment
cttctccactcccactgcttcacttgactagcctaa

SEQ ID NO: 26276 - DNA, 21 bp, Artificial Sequence
  synthetic circulating small noncoding RNA (sncRNA) 5' YRNA-derived fragment
tattgcacttgactagtcctg

SEQ ID NO: 26277 - DNA, 31 bp, Artificial Sequence
  synthetic circulating small noncoding RNA (sncRNA) 5' YRNA-derived fragment
gctagtcaagtgaagcagtgggagtggagaa

SEQ ID NO: 26278 - DNA, 22 bp, Artificial Sequence
  synthetic circulating small noncoding RNA (sncRNA) 5' YRNA-derived fragment
cccactgcttcacttgactaga

SEQ ID NO: 26279 - DNA, 30 bp, Artificial Sequence
  synthetic circulating small noncoding RNA (sncRNA) 5' YRNA-derived fragment
ggctggtctgaaggtagtgggttatctcga

SEQ ID NO: 26280 - DNA, 18 bp, Artificial Sequence
  synthetic circulating small noncoding RNA (sncRNA) 5' YRNA-derived fragment
agccagtcaaatttagca

SEQ ID NO: 26281 - DNA, 24 bp, Artificial Sequence
  synthetic circulating small noncoding RNA (sncRNA) 5' YRNA-derived fragment
ggcttgtctgatggtagtgggtta

SEQ ID NO: 26282 - DNA, 28 bp, Artificial Sequence
  synthetic circulating small noncoding RNA (sncRNA) 5' YRNA-derived fragment
tttaggctagtcaagtgaagcagtggga

SEQ ID NO: 26283 - DNA, 34 bp, Artificial Sequence
  synthetic circulating small noncoding RNA (sncRNA) 5' YRNA-derived fragment
tgctccactcccactgcttcacttgaccagcctt

SEQ ID NO: 26284 - DNA, 20 bp, Artificial Sequence
  synthetic circulating small noncoding RNA (sncRNA) 5' YRNA-derived fragment
actcccactgcttcacttga

SEQ ID NO: 26285 - DNA, 21 bp, Artificial Sequence
  synthetic circulating small noncoding RNA (sncRNA) 5' YRNA-derived fragment
ggctagtcaagtgaagcagtg

SEQ ID NO: 26286 - DNA, 25 bp, Artificial Sequence
  synthetic circulating small noncoding RNA (sncRNA) 5' YRNA-derived fragment
gatagtagtgggttatcagaacaca

SEQ ID NO: 26287 - DNA, 40 bp, Artificial Sequence
  synthetic circulating small noncoding RNA (sncRNA) 5' YRNA-derived fragment
ggctggtccaatggtagtggtttatcagaacttattcaca

SEQ ID NO: 26288 - DNA, 27 bp, Artificial Sequence
  synthetic circulating small noncoding RNA (sncRNA) 5' YRNA-derived fragment
aaagttggtatacaaccccccactgct

SEQ ID NO: 26289 - DNA, 29 bp, Artificial Sequence
  synthetic circulating small noncoding RNA (sncRNA) 5' YRNA-derived fragment
aatttctgataacccactaccatcggacc

SEQ ID NO: 26290 - DNA, 34 bp, Artificial Sequence
  synthetic circulating small noncoding RNA (sncRNA) 5' YRNA-derived fragment
cagtagtgagaaggggggaaagagtagaacaagg

SEQ ID NO: 26291 - DNA, 37 bp, Artificial Sequence
  synthetic circulating small noncoding RNA (sncRNA) 5' YRNA-derived fragment
tcaattagttgtcaacaccactgcactcggaccagcc

SEQ ID NO: 26292 - DNA, 28 bp, Artificial Sequence
  synthetic circulating small noncoding RNA (sncRNA) 5' YRNA-derived fragment
aagccagtcaaatttagcagtgggggat

SEQ ID NO: 26293 - DNA, 25 bp, Artificial Sequence
  synthetic circulating small noncoding RNA (sncRNA) 5' YRNA-derived fragment
agttcgatctgtaactgactgtgaa

SEQ ID NO: 26294 - DNA, 31 bp, Artificial Sequence
  synthetic circulating small noncoding RNA (sncRNA) 5' YRNA-derived fragment
attgagataactcactacctttggaccaacc

SEQ ID NO: 26295 - DNA, 22 bp, Artificial Sequence
  synthetic circulating small noncoding RNA (sncRNA) 5' YRNA-derived fragment
cactgctaaatttggctggctt

SEQ ID NO: 26296 - DNA, 29 bp, Artificial Sequence
  synthetic circulating small noncoding RNA (sncRNA) 5' YRNA-derived fragment
gctggtctgaaggtaatgagttatctcaa

SEQ ID NO: 26297 - DNA, 47 bp, Artificial Sequence
  synthetic circulating small noncoding RNA (sncRNA) 5' YRNA-derived fragment
actagtcaagtgcagtagtgagaaggggggaaagagtagaacaagga

SEQ ID NO: 26298 - DNA, 26 bp, Artificial Sequence
  synthetic circulating small noncoding RNA (sncRNA) 5' YRNA-derived fragment
ggctggtccgagtgcagtggtgttta

SEQ ID NO: 26299 - DNA, 45 bp, Artificial Sequence
  synthetic circulating small noncoding RNA (sncRNA) 5' YRNA-derived fragment
ggctggtccgagtgcagtggtgtttacaactaattgatcacaacc

SEQ ID NO: 26300 - DNA, 23 bp, Artificial Sequence
  synthetic circulating small noncoding RNA (sncRNA) 5' YRNA-derived fragment
cagtcaaatttagcagtggagag

SEQ ID NO: 26301 - DNA, 29 bp, Artificial Sequence
  synthetic circulating small noncoding RNA (sncRNA) 5' YRNA-derived fragment
ccggtctgaaggtagtgagttatctcaat

SEQ ID NO: 26302 - DNA, 29 bp, Artificial Sequence
  synthetic circulating small noncoding RNA (sncRNA) 5' YRNA-derived fragment
aggaacaaagaaatctgtaactggttgtg

SEQ ID NO: 26303 - DNA, 27 bp, Artificial Sequence
  synthetic circulating small noncoding RNA (sncRNA) 5' YRNA-derived fragment
cttctcactactgcccttgactagtct

SEQ ID NO: 26304 - DNA, 30 bp, Artificial Sequence
  synthetic circulating small noncoding RNA (sncRNA) 5' YRNA-derived fragment
ttctcactactgcacttgactagtcttaaa

SEQ ID NO: 26305 - DNA, 22 bp, Artificial Sequence
  synthetic circulating small noncoding RNA (sncRNA) 5' YRNA-derived fragment
ggctggtcctatggtagtgggt

SEQ ID NO: 26306 - DNA, 44 bp, Artificial Sequence
  synthetic circulating small noncoding RNA (sncRNA) 5' YRNA-derived fragment
gatttctttgttccttctccactcccactgcttcacttgactag

SEQ ID NO: 26307 - DNA, 28 bp, Artificial Sequence
  synthetic circulating small noncoding RNA (sncRNA) 5' YRNA-derived fragment
cactcccactgcttcacttgactagaaa

SEQ ID NO: 26308 - DNA, 40 bp, Artificial Sequence
  synthetic circulating small noncoding RNA (sncRNA) 5' YRNA-derived fragment
tgttaataaattctgataacccactaccatcagaccagcc

SEQ ID NO: 26309 - DNA, 22 bp, Artificial Sequence
  synthetic circulating small noncoding RNA (sncRNA) 5' YRNA-derived fragment
ccagtcaaatttagcagtgggg

SEQ ID NO: 26310 - DNA, 23 bp, Artificial Sequence
  synthetic circulating small noncoding RNA (sncRNA) 5' YRNA-derived fragment
tggtccgaaggtagtgagttatc

SEQ ID NO: 26311 - DNA, 44 bp, Artificial Sequence
  synthetic circulating small noncoding RNA (sncRNA) 5' YRNA-derived fragment
ttctttgttccttctccactcccactgcttcacttgactagcct

SEQ ID NO: 26312 - DNA, 21 bp, Artificial Sequence
  synthetic circulating small noncoding RNA (sncRNA) 5' YRNA-derived fragment
ggctggtccgagtgcagtggt

SEQ ID NO: 26313 - DNA, 29 bp, Artificial Sequence
  synthetic circulating small noncoding RNA (sncRNA) 5' YRNA-derived fragment
tcccactgcttcacttgactagccttctt

SEQ ID NO: 26314 - DNA, 26 bp, Artificial Sequence
  synthetic circulating small noncoding RNA (sncRNA) 5' YRNA-derived fragment
ctatggtagtgggttatcagaactta

SEQ ID NO: 26315 - DNA, 24 bp, Artificial Sequence
  synthetic circulating small noncoding RNA (sncRNA) 5' YRNA-derived fragment
actagtcaagtgcagtagtgagga

SEQ ID NO: 26316 - DNA, 42 bp, Artificial Sequence
  synthetic circulating small noncoding RNA (sncRNA) 5' YRNA-derived fragment
aacattaataagttctgataacccactaccatcgaaccagcc

SEQ ID NO: 26317 - DNA, 30 bp, Artificial Sequence
  synthetic circulating small noncoding RNA (sncRNA) 5' YRNA-derived fragment
gctggttcgatggcagtgggttatcagaac

SEQ ID NO: 26318 - DNA, 26 bp, Artificial Sequence
  synthetic circulating small noncoding RNA (sncRNA) 5' YRNA-derived fragment
ctactctttccccccttctcactact

SEQ ID NO: 26319 - DNA, 29 bp, Artificial Sequence
  synthetic circulating small noncoding RNA (sncRNA) 5' YRNA-derived fragment
ttgagataacccactaccttcggacgagc

SEQ ID NO: 26320 - DNA, 18 bp, Artificial Sequence
  synthetic circulating small noncoding RNA (sncRNA) 5' YRNA-derived fragment
tagtaggttatcagaact

SEQ ID NO: 26321 - DNA, 22 bp, Artificial Sequence
  synthetic circulating small noncoding RNA (sncRNA) 5' YRNA-derived fragment
gatggtagtgggttatctgaac

SEQ ID NO: 26322 - DNA, 31 bp, Artificial Sequence
  synthetic circulating small noncoding RNA (sncRNA) 5' YRNA-derived fragment
tgttaataagttctgataacccactaccatc

SEQ ID NO: 26323 - DNA, 18 bp, Artificial Sequence
  synthetic circulating small noncoding RNA (sncRNA) 5' YRNA-derived fragment
acgttagtgacactaatg

SEQ ID NO: 26324 - DNA, 26 bp, Artificial Sequence
  synthetic circulating small noncoding RNA (sncRNA) 5' YRNA-derived fragment
gtagaacaaggagttcgatctgtaac

SEQ ID NO: 26325 - DNA, 28 bp, Artificial Sequence
  synthetic circulating small noncoding RNA (sncRNA) 5' YRNA-derived fragment
ggctagtcaagggaagcagtgggagtgg

SEQ ID NO: 26326 - DNA, 19 bp, Artificial Sequence
  synthetic circulating small noncoding RNA (sncRNA) 5' YRNA-derived fragment
tagtgggttatcagaattt

SEQ ID NO: 26327 - DNA, 28 bp, Artificial Sequence
  synthetic circulating small noncoding RNA (sncRNA) 5' YRNA-derived fragment
cccccactgctaaatttgactggcttta

SEQ ID NO: 26328 - DNA, 26 bp, Artificial Sequence
  synthetic circulating small noncoding RNA (sncRNA) 5' YRNA-derived fragment
tcctatggtagtgggttatcagaact

SEQ ID NO: 26329 - DNA, 26 bp, Artificial Sequence
  synthetic circulating small noncoding RNA (sncRNA) 5' YRNA-derived fragment
aaagccagtcaaatttagcagtgggg

SEQ ID NO: 26330 - DNA, 44 bp, Artificial Sequence
  synthetic circulating small noncoding RNA (sncRNA) 5' YRNA-derived fragment
cacaaccagttacagatttctttgttccttctccactcccactg

SEQ ID NO: 26331 - DNA, 36 bp, Artificial Sequence
  synthetic circulating small noncoding RNA (sncRNA) 5' YRNA-derived fragment
ggggaaagagtagaacaaggagttcgatctgtaact

SEQ ID NO: 26332 - DNA, 34 bp, Artificial Sequence
  synthetic circulating small noncoding RNA (sncRNA) 5' YRNA-derived fragment
gctggtccgatggtagtgggttatcagaacttat

SEQ ID NO: 26333 - DNA, 36 bp, Artificial Sequence
  synthetic circulating small noncoding RNA (sncRNA) 5' YRNA-derived fragment
agttggtatacaaccccccactgctaaatttgactg

SEQ ID NO: 26334 - DNA, 43 bp, Artificial Sequence
  synthetic circulating small noncoding RNA (sncRNA) 5' YRNA-derived fragment
gactagtcaagtgaagcagtgggagtggagaaggaacaaagaa

SEQ ID NO: 26335 - DNA, 29 bp, Artificial Sequence
  synthetic circulating small noncoding RNA (sncRNA) 5' YRNA-derived fragment
aagttctgataacccactaccattggaca

SEQ ID NO: 26336 - DNA, 18 bp, Artificial Sequence
  synthetic circulating small noncoding RNA (sncRNA) 5' YRNA-derived fragment
gcttcacttgactagcct

SEQ ID NO: 26337 - DNA, 36 bp, Artificial Sequence
  synthetic circulating small noncoding RNA (sncRNA) 5' YRNA-derived fragment
aaggctagtcaagtgaagcagtgggagtggagaagg

SEQ ID NO: 26338 - DNA, 26 bp, Artificial Sequence
  synthetic circulating small noncoding RNA (sncRNA) 5' YRNA-derived fragment
tcagatggtagtgggttatcagaact

SEQ ID NO: 26339 - DNA, 21 bp, Artificial Sequence
  synthetic circulating small noncoding RNA (sncRNA) 5' YRNA-derived fragment
ggtagtgggttatcagaactt

SEQ ID NO: 26340 - DNA, 22 bp, Artificial Sequence
  synthetic circulating small noncoding RNA (sncRNA) 5' YRNA-derived fragment
attaagttctgataacccacta

SEQ ID NO: 26341 - DNA, 27 bp, Artificial Sequence
  synthetic circulating small noncoding RNA (sncRNA) 5' YRNA-derived fragment
gggaaagagtagaacaaggagttcgat

SEQ ID NO: 26342 - DNA, 20 bp, Artificial Sequence
  synthetic circulating small noncoding RNA (sncRNA) 5' YRNA-derived fragment
agttgtaaacaccactgcac

SEQ ID NO: 26343 - DNA, 27 bp, Artificial Sequence
  synthetic circulating small noncoding RNA (sncRNA) 5' YRNA-derived fragment
tatggtagtgggttatcagaacttatt

SEQ ID NO: 26344 - DNA, 19 bp, Artificial Sequence
  synthetic circulating small noncoding RNA (sncRNA) 5' YRNA-derived fragment
tttagcagtggggggttgt

SEQ ID NO: 26345 - DNA, 27 bp, Artificial Sequence
  synthetic circulating small noncoding RNA (sncRNA) 5' YRNA-derived fragment
gtcctgtggtagtgggttatcagaact

SEQ ID NO: 26346 - DNA, 35 bp, Artificial Sequence
  synthetic circulating small noncoding RNA (sncRNA) 5' YRNA-derived fragment
actttagtgacactaatgttaataagttctgataa

SEQ ID NO: 26347 - DNA, 21 bp, Artificial Sequence
  synthetic circulating small noncoding RNA (sncRNA) 5' YRNA-derived fragment
ttgttctactctttcccccct

SEQ ID NO: 26348 - DNA, 24 bp, Artificial Sequence
  synthetic circulating small noncoding RNA (sncRNA) 5' YRNA-derived fragment
cttctcactactgcacttgactaa

SEQ ID NO: 26349 - DNA, 32 bp, Artificial Sequence
  synthetic circulating small noncoding RNA (sncRNA) 5' YRNA-derived fragment
aagccagtcaaatttagcagtggagggttgtg

SEQ ID NO: 26350 - DNA, 24 bp, Artificial Sequence
  synthetic circulating small noncoding RNA (sncRNA) 5' YRNA-derived fragment
ccagtcaaatttagcagttggggg

SEQ ID NO: 26351 - DNA, 32 bp, Artificial Sequence
  synthetic circulating small noncoding RNA (sncRNA) 5' YRNA-derived fragment
agctagtcaagtgaagcagtgggagtggagaa

SEQ ID NO: 26352 - DNA, 20 bp, Artificial Sequence
  synthetic circulating small noncoding RNA (sncRNA) 5' YRNA-derived fragment
tagccagtcaaatttagcag

SEQ ID NO: 26353 - DNA, 37 bp, Artificial Sequence
  synthetic circulating small noncoding RNA (sncRNA) 5' YRNA-derived fragment
ttctccactcccactgcttcacttgactagccttttg

SEQ ID NO: 26354 - DNA, 28 bp, Artificial Sequence
  synthetic circulating small noncoding RNA (sncRNA) 5' YRNA-derived fragment
cagaacttattaacattagtgtcactga

SEQ ID NO: 26355 - DNA, 37 bp, Artificial Sequence
  synthetic circulating small noncoding RNA (sncRNA) 5' YRNA-derived fragment
agtgacactaatgttaataagttctgataacccacta

SEQ ID NO: 26356 - DNA, 36 bp, Artificial Sequence
  synthetic circulating small noncoding RNA (sncRNA) 5' YRNA-derived fragment
gactagtcaagtgaagcagtgggagtggagaaggaa

SEQ ID NO: 26357 - DNA, 39 bp, Artificial Sequence
  synthetic circulating small noncoding RNA (sncRNA) 5' YRNA-derived fragment
gctccttctccactcccactgcttcacttgactagcctt

SEQ ID NO: 26358 - DNA, 28 bp, Artificial Sequence
  synthetic circulating small noncoding RNA (sncRNA) 5' YRNA-derived fragment
tctttcagtcaaatttagcagtgggggg

SEQ ID NO: 26359 - DNA, 38 bp, Artificial Sequence
  synthetic circulating small noncoding RNA (sncRNA) 5' YRNA-derived fragment
ttgataagttctgataacccactactatcggaccagcc

SEQ ID NO: 26360 - DNA, 31 bp, Artificial Sequence
  synthetic circulating small noncoding RNA (sncRNA) 5' YRNA-derived fragment
ggctagtccgaaggtagagagttatctcagt

SEQ ID NO: 26361 - DNA, 37 bp, Artificial Sequence
  synthetic circulating small noncoding RNA (sncRNA) 5' YRNA-derived fragment
ctggtccgatggtagtgggttatcagaacttattaac

SEQ ID NO: 26362 - DNA, 20 bp, Artificial Sequence
  synthetic circulating small noncoding RNA (sncRNA) 5' YRNA-derived fragment
gttctgataacccactacca

SEQ ID NO: 26363 - DNA, 32 bp, Artificial Sequence
  synthetic circulating small noncoding RNA (sncRNA) 5' YRNA-derived fragment
gggttatcagaacttattaacattagtgtcac

SEQ ID NO: 26364 - DNA, 26 bp, Artificial Sequence
  synthetic circulating small noncoding RNA (sncRNA) 5' YRNA-derived fragment
agccagtcagattttagcagtggggg

SEQ ID NO: 26365 - DNA, 23 bp, Artificial Sequence
  synthetic circulating small noncoding RNA (sncRNA) 5' YRNA-derived fragment
aaggctagtcaagtgaagcagtg

SEQ ID NO: 26366 - DNA, 21 bp, Artificial Sequence
  synthetic circulating small noncoding RNA (sncRNA) 5' YRNA-derived fragment
tccgagtgttgtgggttattg

SEQ ID NO: 26367 - DNA, 24 bp, Artificial Sequence
  synthetic circulating small noncoding RNA (sncRNA) 5' YRNA-derived fragment
gataactcactaccttcggaccag

SEQ ID NO: 26368 - DNA, 20 bp, Artificial Sequence
  synthetic circulating small noncoding RNA (sncRNA) 5' YRNA-derived fragment
agttctgataacccaacacc

SEQ ID NO: 26369 - DNA, 25 bp, Artificial Sequence
  synthetic circulating small noncoding RNA (sncRNA) 5' YRNA-derived fragment
cctcgctgctaaatttgactggctt

SEQ ID NO: 26370 - DNA, 19 bp, Artificial Sequence
  synthetic circulating small noncoding RNA (sncRNA) 5' YRNA-derived fragment
aacaaggagttcgatctgt

SEQ ID NO: 26371 - DNA, 19 bp, Artificial Sequence
  synthetic circulating small noncoding RNA (sncRNA) 5' YRNA-derived fragment
cgagtgttgtgggttattg

SEQ ID NO: 26372 - DNA, 29 bp, Artificial Sequence
  synthetic circulating small noncoding RNA (sncRNA) 5' YRNA-derived fragment
cgagtgttgtgggttattgttaagttgat

SEQ ID NO: 26373 - DNA, 38 bp, Artificial Sequence
  synthetic circulating small noncoding RNA (sncRNA) 5' YRNA-derived fragment
gttccttctccactcccactgcttcacttgactagcct

SEQ ID NO: 26374 - DNA, 35 bp, Artificial Sequence
  synthetic circulating small noncoding RNA (sncRNA) 5' YRNA-derived fragment
aataagttctgataacccactaccatcggaccagt

SEQ ID NO: 26375 - DNA, 29 bp, Artificial Sequence
  synthetic circulating small noncoding RNA (sncRNA) 5' YRNA-derived fragment
aacaataacccacaacactcagaccaaca

SEQ ID NO: 26376 - DNA, 36 bp, Artificial Sequence
  synthetic circulating small noncoding RNA (sncRNA) 5' YRNA-derived fragment
tatacaaccccccactgctaaatttgactggcttta

SEQ ID NO: 26377 - DNA, 26 bp, Artificial Sequence
  synthetic circulating small noncoding RNA (sncRNA) 5' YRNA-derived fragment
tgtctcactactgcacttgactagtc

SEQ ID NO: 26378 - DNA, 32 bp, Artificial Sequence
  synthetic circulating small noncoding RNA (sncRNA) 5' YRNA-derived fragment
tgtctccccccacaaccgcgcttgactagctt

SEQ ID NO: 26379 - DNA, 29 bp, Artificial Sequence
  synthetic circulating small noncoding RNA (sncRNA) 5' YRNA-derived fragment
aagttctgataacccactaccatcgaacc

SEQ ID NO: 26380 - DNA, 31 bp, Artificial Sequence
  synthetic circulating small noncoding RNA (sncRNA) 5' YRNA-derived fragment
gcttttccgatggtagtgggttatctgaact

SEQ ID NO: 26381 - DNA, 30 bp, Artificial Sequence
  synthetic circulating small noncoding RNA (sncRNA) 5' YRNA-derived fragment
cagtcaaatttagcagtggggggttgtata

SEQ ID NO: 26382 - DNA, 28 bp, Artificial Sequence
  synthetic circulating small noncoding RNA (sncRNA) 5' YRNA-derived fragment
acccccaactgctaaatttgactggctt

SEQ ID NO: 26383 - DNA, 24 bp, Artificial Sequence
  synthetic circulating small noncoding RNA (sncRNA) 5' YRNA-derived fragment
tcccacttcttcacttgactagcc

SEQ ID NO: 26384 - DNA, 32 bp, Artificial Sequence
  synthetic circulating small noncoding RNA (sncRNA) 5' YRNA-derived fragment
agttcgatctgtaactgactgtgaacaatcaa

SEQ ID NO: 26385 - DNA, 22 bp, Artificial Sequence
  synthetic circulating small noncoding RNA (sncRNA) 5' YRNA-derived fragment
cttgttctactctttcccccct

SEQ ID NO: 26386 - DNA, 39 bp, Artificial Sequence
  synthetic circulating small noncoding RNA (sncRNA) 5' YRNA-derived fragment
tggctggtccgatggtagtgggttatcagaacttattaa

SEQ ID NO: 26387 - DNA, 40 bp, Artificial Sequence
  synthetic circulating small noncoding RNA (sncRNA) 5' YRNA-derived fragment
ggctggtacaatggtagtgggttatcagaacttattaaca

SEQ ID NO: 26388 - DNA, 24 bp, Artificial Sequence
  synthetic circulating small noncoding RNA (sncRNA) 5' YRNA-derived fragment
agatggtagtgggttatcagaact

SEQ ID NO: 26389 - DNA, 25 bp, Artificial Sequence
  synthetic circulating small noncoding RNA (sncRNA) 5' YRNA-derived fragment
cctcccactgctaaatttgactggc

SEQ ID NO: 26390 - DNA, 33 bp, Artificial Sequence
  synthetic circulating small noncoding RNA (sncRNA) 5' YRNA-derived fragment
tctgtaactgactgtgaacaatcaattgagata

SEQ ID NO: 26391 - DNA, 27 bp, Artificial Sequence
  synthetic circulating small noncoding RNA (sncRNA) 5' YRNA-derived fragment
ggtccaatggtagtggtttatcagaac

SEQ ID NO: 26392 - DNA, 25 bp, Artificial Sequence
  synthetic circulating small noncoding RNA (sncRNA) 5' YRNA-derived fragment
gctagtcaagcgtggttgtgggggg

SEQ ID NO: 26393 - DNA, 21 bp, Artificial Sequence
  synthetic circulating small noncoding RNA (sncRNA) 5' YRNA-derived fragment
accagtcaaatttagcagtgg

SEQ ID NO: 26394 - DNA, 39 bp, Artificial Sequence
  synthetic circulating small noncoding RNA (sncRNA) 5' YRNA-derived fragment
tttgttccttctccactcccactgcttcacttgactagc

SEQ ID NO: 26395 - DNA, 26 bp, Artificial Sequence
  synthetic circulating small noncoding RNA (sncRNA) 5' YRNA-derived fragment
agactagtcaagtgcagtagtgagga

SEQ ID NO: 26396 - DNA, 25 bp, Artificial Sequence
  synthetic circulating small noncoding RNA (sncRNA) 5' YRNA-derived fragment
gccagtcacatttagcagtgtgggg

SEQ ID NO: 26397 - DNA, 30 bp, Artificial Sequence
  synthetic circulating small noncoding RNA (sncRNA) 5' YRNA-derived fragment
ggctggtcccagtgcagtggtgtttacaac

SEQ ID NO: 26398 - DNA, 34 bp, Artificial Sequence
  synthetic circulating small noncoding RNA (sncRNA) 5' YRNA-derived fragment
caattgagataactcactaccttcggaccagcca

SEQ ID NO: 26399 - DNA, 29 bp, Artificial Sequence
  synthetic circulating small noncoding RNA (sncRNA) 5' YRNA-derived fragment
cttagactagtcaagtgcagtagagagaa

SEQ ID NO: 26400 - DNA, 32 bp, Artificial Sequence
  synthetic circulating small noncoding RNA (sncRNA) 5' YRNA-derived fragment
aattgagataactcactacctttgggccagcc

SEQ ID NO: 26401 - DNA, 33 bp, Artificial Sequence
  synthetic circulating small noncoding RNA (sncRNA) 5' YRNA-derived fragment
tccgatggtagtgggttatcagaacttattaac

SEQ ID NO: 26402 - DNA, 33 bp, Artificial Sequence
  synthetic circulating small noncoding RNA (sncRNA) 5' YRNA-derived fragment
aagccagtcaaatttagcagtgggggattgtct

SEQ ID NO: 26403 - DNA, 33 bp, Artificial Sequence
  synthetic circulating small noncoding RNA (sncRNA) 5' YRNA-derived fragment
ttagttgtaaacaccactgcactcggaccagcc

SEQ ID NO: 26404 - DNA, 23 bp, Artificial Sequence
  synthetic circulating small noncoding RNA (sncRNA) 5' YRNA-derived fragment
aacccactaccattggacaagcc

SEQ ID NO: 26405 - DNA, 22 bp, Artificial Sequence
  synthetic circulating small noncoding RNA (sncRNA) 5' YRNA-derived fragment
ggctggtccgaaggtggtgagt

SEQ ID NO: 26406 - DNA, 21 bp, Artificial Sequence
  synthetic circulating small noncoding RNA (sncRNA) 5' YRNA-derived fragment
gctgctaaatttgactggctt

SEQ ID NO: 26407 - DNA, 37 bp, Artificial Sequence
  synthetic circulating small noncoding RNA (sncRNA) 5' YRNA-derived fragment
tgtttccccccttctcactactgcacttgactagtct

SEQ ID NO: 26408 - DNA, 18 bp, Artificial Sequence
  synthetic circulating small noncoding RNA (sncRNA) 5' YRNA-derived fragment
tcgctaccttaggaccag

SEQ ID NO: 26409 - DNA, 23 bp, Artificial Sequence
  synthetic circulating small noncoding RNA (sncRNA) 5' YRNA-derived fragment
tagtcaagtgaagcagtgggagt

SEQ ID NO: 26410 - DNA, 30 bp, Artificial Sequence
  synthetic circulating small noncoding RNA (sncRNA) 5' YRNA-derived fragment
tggtacaatggtagtgggttatcagaactt

SEQ ID NO: 26411 - DNA, 19 bp, Artificial Sequence
  synthetic circulating small noncoding RNA (sncRNA) 5' YRNA-derived fragment
caagtgcagtagtgagaag

SEQ ID NO: 26412 - DNA, 26 bp, Artificial Sequence
  synthetic circulating small noncoding RNA (sncRNA) 5' YRNA-derived fragment
ccccacaaccgcgcttgactagcttg

SEQ ID NO: 26413 - DNA, 35 bp, Artificial Sequence
  synthetic circulating small noncoding RNA (sncRNA) 5' YRNA-derived fragment
ttaacattgtctccccccacaaccgcgcttgacta

SEQ ID NO: 26414 - DNA, 33 bp, Artificial Sequence
  synthetic circulating small noncoding RNA (sncRNA) 5' YRNA-derived fragment
cagtcagttacagatcgaactccttgttctact

SEQ ID NO: 26415 - DNA, 19 bp, Artificial Sequence
  synthetic circulating small noncoding RNA (sncRNA) 5' YRNA-derived fragment
agactagtcaagtgcagta

SEQ ID NO: 26416 - DNA, 24 bp, Artificial Sequence
  synthetic circulating small noncoding RNA (sncRNA) 5' YRNA-derived fragment
ccattcaaatttagcagtgggggg

SEQ ID NO: 26417 - DNA, 32 bp, Artificial Sequence
  synthetic circulating small noncoding RNA (sncRNA) 5' YRNA-derived fragment
tgacccccccactgctaaatttgactggcttt

SEQ ID NO: 26418 - DNA, 31 bp, Artificial Sequence
  synthetic circulating small noncoding RNA (sncRNA) 5' YRNA-derived fragment
tttggtccaatggtagtgggttatcagaact

SEQ ID NO: 26419 - DNA, 26 bp, Artificial Sequence
  synthetic circulating small noncoding RNA (sncRNA) 5' YRNA-derived fragment
aactagtcaagtgcagtagtgagaag

SEQ ID NO: 26420 - DNA, 24 bp, Artificial Sequence
  synthetic circulating small noncoding RNA (sncRNA) 5' YRNA-derived fragment
agatccctggcggtgatgtttaca

SEQ ID NO: 26421 - DNA, 31 bp, Artificial Sequence
  synthetic circulating small noncoding RNA (sncRNA) 5' YRNA-derived fragment
taagttctgataacccactaccatcggacca

SEQ ID NO: 26422 - DNA, 31 bp, Artificial Sequence
  synthetic circulating small noncoding RNA (sncRNA) 5' YRNA-derived fragment
tcctggtccgaatgtaatgagttatctcaat

SEQ ID NO: 26423 - DNA, 28 bp, Artificial Sequence
  synthetic circulating small noncoding RNA (sncRNA) 5' YRNA-derived fragment
agcagtggggggttgtataccaacttta

SEQ ID NO: 26424 - DNA, 24 bp, Artificial Sequence
  synthetic circulating small noncoding RNA (sncRNA) 5' YRNA-derived fragment
atagtcaagtgcagtagtgagaag

SEQ ID NO: 26425 - DNA, 29 bp, Artificial Sequence
  synthetic circulating small noncoding RNA (sncRNA) 5' YRNA-derived fragment
tcaattgattgttcacagtcagttacaga

SEQ ID NO: 26426 - DNA, 25 bp, Artificial Sequence
  synthetic circulating small noncoding RNA (sncRNA) 5' YRNA-derived fragment
ctgatggtagtgggttatcagaatt

SEQ ID NO: 26427 - DNA, 22 bp, Artificial Sequence
  synthetic circulating small noncoding RNA (sncRNA) 5' YRNA-derived fragment
ttccactgcttcacttgactag

SEQ ID NO: 26428 - DNA, 20 bp, Artificial Sequence
  synthetic circulating small noncoding RNA (sncRNA) 5' YRNA-derived fragment
aataagttctgataaccccc

SEQ ID NO: 26429 - DNA, 30 bp, Artificial Sequence
  synthetic circulating small noncoding RNA (sncRNA) 5' YRNA-derived fragment
agctggtccaaaggtagtgagttatctcaa

SEQ ID NO: 26430 - DNA, 23 bp, Artificial Sequence
  synthetic circulating small noncoding RNA (sncRNA) 5' YRNA-derived fragment
ctagtcaaatgcagtagtgagaa

SEQ ID NO: 26431 - DNA, 27 bp, Artificial Sequence
  synthetic circulating small noncoding RNA (sncRNA) 5' YRNA-derived fragment
cctttcactactgcacttgactagtct

SEQ ID NO: 26432 - DNA, 37 bp, Artificial Sequence
  synthetic circulating small noncoding RNA (sncRNA) 5' YRNA-derived fragment
gttaataagttctgataacccactaccatcggaccag

SEQ ID NO: 26433 - DNA, 21 bp, Artificial Sequence
  synthetic circulating small noncoding RNA (sncRNA) 5' YRNA-derived fragment
ctccttgttctactctttccc

SEQ ID NO: 26434 - DNA, 44 bp, Artificial Sequence
  synthetic circulating small noncoding RNA (sncRNA) 5' YRNA-derived fragment
aaaccagtcaaatttagcagtggggggttgtataccaactttaa

SEQ ID NO: 26435 - DNA, 31 bp, Artificial Sequence
  synthetic circulating small noncoding RNA (sncRNA) 5' YRNA-derived fragment
ggctggcctgatggtagtgagttatctcaac

SEQ ID NO: 26436 - DNA, 30 bp, Artificial Sequence
  synthetic circulating small noncoding RNA (sncRNA) 5' YRNA-derived fragment
ttgagataacacactacctttggaccagcc

SEQ ID NO: 26437 - DNA, 29 bp, Artificial Sequence
  synthetic circulating small noncoding RNA (sncRNA) 5' YRNA-derived fragment
gccagtcaaatttagcagtggggggttgt

SEQ ID NO: 26438 - DNA, 22 bp, Artificial Sequence
  synthetic circulating small noncoding RNA (sncRNA) 5' YRNA-derived fragment
ggcttgtctgatggtagtgggt

SEQ ID NO: 26439 - DNA, 29 bp, Artificial Sequence
  synthetic circulating small noncoding RNA (sncRNA) 5' YRNA-derived fragment
aagctagtcaagtgaagcagtgggagtgg

SEQ ID NO: 26440 - DNA, 27 bp, Artificial Sequence
  synthetic circulating small noncoding RNA (sncRNA) 5' YRNA-derived fragment
ccctcgctgctaaatttgactggcttt

SEQ ID NO: 26441 - DNA, 18 bp, Artificial Sequence
  synthetic circulating small noncoding RNA (sncRNA) 5' YRNA-derived fragment
agttctgataaccactac

SEQ ID NO: 26442 - DNA, 26 bp, Artificial Sequence
  synthetic circulating small noncoding RNA (sncRNA) 5' YRNA-derived fragment
ccttctcactactacacttgactagt

SEQ ID NO: 26443 - DNA, 21 bp, Artificial Sequence
  synthetic circulating small noncoding RNA (sncRNA) 5' YRNA-derived fragment
aagccattcaaatttagcagt

SEQ ID NO: 26444 - DNA, 22 bp, Artificial Sequence
  synthetic circulating small noncoding RNA (sncRNA) 5' YRNA-derived fragment
attcccactgcttcacttgact

SEQ ID NO: 26445 - DNA, 26 bp, Artificial Sequence
  synthetic circulating small noncoding RNA (sncRNA) 5' YRNA-derived fragment
gttaataagttctgataacccactac

SEQ ID NO: 26446 - DNA, 24 bp, Artificial Sequence
  synthetic circulating small noncoding RNA (sncRNA) 5' YRNA-derived fragment
taacccactaccatcggaccagtc

SEQ ID NO: 26447 - DNA, 31 bp, Artificial Sequence
  synthetic circulating small noncoding RNA (sncRNA) 5' YRNA-derived fragment
gttctgataacccactatcattggaccaacc

SEQ ID NO: 26448 - DNA, 24 bp, Artificial Sequence
  synthetic circulating small noncoding RNA (sncRNA) 5' YRNA-derived fragment
aagccagtcaaggttagcagtggg

SEQ ID NO: 26449 - DNA, 21 bp, Artificial Sequence
  synthetic circulating small noncoding RNA (sncRNA) 5' YRNA-derived fragment
actgcttcacttgactagcct

SEQ ID NO: 26450 - DNA, 40 bp, Artificial Sequence
  synthetic circulating small noncoding RNA (sncRNA) 5' YRNA-derived fragment
gctagtcaagtgaagcagtgggagtggagaaggaacaaag

SEQ ID NO: 26451 - DNA, 26 bp, Artificial Sequence
  synthetic circulating small noncoding RNA (sncRNA) 5' YRNA-derived fragment
gataacccactactatcggaccagcc

SEQ ID NO: 26452 - DNA, 26 bp, Artificial Sequence
  synthetic circulating small noncoding RNA (sncRNA) 5' YRNA-derived fragment
aagccagtcaaatttagcggtgaggg

SEQ ID NO: 26453 - DNA, 33 bp, Artificial Sequence
  synthetic circulating small noncoding RNA (sncRNA) 5' YRNA-derived fragment
gggctggtcagaaggtagtgagttatctcaatt

SEQ ID NO: 26454 - DNA, 33 bp, Artificial Sequence
  synthetic circulating small noncoding RNA (sncRNA) 5' YRNA-derived fragment
acagtcagttacagatcgaactccttgttctac

SEQ ID NO: 26455 - DNA, 24 bp, Artificial Sequence
  synthetic circulating small noncoding RNA (sncRNA) 5' YRNA-derived fragment
gtcctatggtagtgggttatcaga

SEQ ID NO: 26456 - DNA, 29 bp, Artificial Sequence
  synthetic circulating small noncoding RNA (sncRNA) 5' YRNA-derived fragment
ccccccactgctaaattttactagctttt

SEQ ID NO: 26457 - DNA, 25 bp, Artificial Sequence
  synthetic circulating small noncoding RNA (sncRNA) 5' YRNA-derived fragment
cactgcttcacttgactagcctttt

SEQ ID NO: 26458 - DNA, 26 bp, Artificial Sequence
  synthetic circulating small noncoding RNA (sncRNA) 5' YRNA-derived fragment
cagaacttattaacattagtgtcact

SEQ ID NO: 26459 - DNA, 22 bp, Artificial Sequence
  synthetic circulating small noncoding RNA (sncRNA) 5' YRNA-derived fragment
ggcttgtccgagtgcagtggtg

SEQ ID NO: 26460 - DNA, 21 bp, Artificial Sequence
  synthetic circulating small noncoding RNA (sncRNA) 5' YRNA-derived fragment
actgctaaatttgtctggctt

SEQ ID NO: 26461 - DNA, 39 bp, Artificial Sequence
  synthetic circulating small noncoding RNA (sncRNA) 5' YRNA-derived fragment
agactagtcaagtgtagtagtgagaaggtgggaaagagt

SEQ ID NO: 26462 - DNA, 21 bp, Artificial Sequence
  synthetic circulating small noncoding RNA (sncRNA) 5' YRNA-derived fragment
cctctgtttcactgaactagc

SEQ ID NO: 26463 - DNA, 22 bp, Artificial Sequence
  synthetic circulating small noncoding RNA (sncRNA) 5' YRNA-derived fragment
tgtctcactactgcacttgact

SEQ ID NO: 26464 - DNA, 28 bp, Artificial Sequence
  synthetic circulating small noncoding RNA (sncRNA) 5' YRNA-derived fragment
agactagtcaagtgcagtagtgagaagg

SEQ ID NO: 26465 - DNA, 24 bp, Artificial Sequence
  synthetic circulating small noncoding RNA (sncRNA) 5' YRNA-derived fragment
taacccactaccatcgaaccagcc

SEQ ID NO: 26466 - DNA, 19 bp, Artificial Sequence
  synthetic circulating small noncoding RNA (sncRNA) 5' YRNA-derived fragment
agttctgataacccactat

SEQ ID NO: 26467 - DNA, 39 bp, Artificial Sequence
  synthetic circulating small noncoding RNA (sncRNA) 5' YRNA-derived fragment
ttgatcacaaccagttacagatttctttgttccttctcc

SEQ ID NO: 26468 - DNA, 45 bp, Artificial Sequence
  synthetic circulating small noncoding RNA (sncRNA) 5' YRNA-derived fragment
tcactaaagttggtatacaaccccccactgctaaatttgactggc

SEQ ID NO: 26469 - DNA, 18 bp, Artificial Sequence
  synthetic circulating small noncoding RNA (sncRNA) 5' YRNA-derived fragment
agttctgatgacccacta

SEQ ID NO: 26470 - DNA, 42 bp, Artificial Sequence
  synthetic circulating small noncoding RNA (sncRNA) 5' YRNA-derived fragment
aaaccagtcaaatttagcagtggggggttgtataccaacttt

SEQ ID NO: 26471 - DNA, 28 bp, Artificial Sequence
  synthetic circulating small noncoding RNA (sncRNA) 5' YRNA-derived fragment
actccttgttctactctttccccccttc

SEQ ID NO: 26472 - DNA, 23 bp, Artificial Sequence
  synthetic circulating small noncoding RNA (sncRNA) 5' YRNA-derived fragment
ttaagccagtcaaatttagcagt

SEQ ID NO: 26473 - DNA, 25 bp, Artificial Sequence
  synthetic circulating small noncoding RNA (sncRNA) 5' YRNA-derived fragment
gaaatctgtaactggttgtgatcaa

SEQ ID NO: 26474 - DNA, 22 bp, Artificial Sequence
  synthetic circulating small noncoding RNA (sncRNA) 5' YRNA-derived fragment
aaggctagtcaagtgaagcagt

SEQ ID NO: 26475 - DNA, 31 bp, Artificial Sequence
  synthetic circulating small noncoding RNA (sncRNA) 5' YRNA-derived fragment
ttctccactcccactgcttcacttgactagc

SEQ ID NO: 26476 - DNA, 30 bp, Artificial Sequence
  synthetic circulating small noncoding RNA (sncRNA) 5' YRNA-derived fragment
tccccccttctcactactgcacttgactag

SEQ ID NO: 26477 - DNA, 24 bp, Artificial Sequence
  synthetic circulating small noncoding RNA (sncRNA) 5' YRNA-derived fragment
acagatcgaactccttgttctact

SEQ ID NO: 26478 - DNA, 45 bp, Artificial Sequence
  synthetic circulating small noncoding RNA (sncRNA) 5' YRNA-derived fragment
agatttctttgttccttctccactcccactgcttcacttgactag

SEQ ID NO: 26479 - DNA, 28 bp, Artificial Sequence
  synthetic circulating small noncoding RNA (sncRNA) 5' YRNA-derived fragment
cagaacttataaacattagtgtcactaa

SEQ ID NO: 26480 - DNA, 28 bp, Artificial Sequence
  synthetic circulating small noncoding RNA (sncRNA) 5' YRNA-derived fragment
cagtcaaatttagcagtggggggttgta

SEQ ID NO: 26481 - DNA, 25 bp, Artificial Sequence
  synthetic circulating small noncoding RNA (sncRNA) 5' YRNA-derived fragment
gatagtcaagtgaagcagtgggagt

SEQ ID NO: 26482 - DNA, 23 bp, Artificial Sequence
  synthetic circulating small noncoding RNA (sncRNA) 5' YRNA-derived fragment
agttctgagaacccaataccatc

SEQ ID NO: 26483 - DNA, 23 bp, Artificial Sequence
  synthetic circulating small noncoding RNA (sncRNA) 5' YRNA-derived fragment
tcccgctgcttcacttgactagc

SEQ ID NO: 26484 - DNA, 41 bp, Artificial Sequence
  synthetic circulating small noncoding RNA (sncRNA) 5' YRNA-derived fragment
tgttccttctccactcccactgcttcacttgactagccttt

SEQ ID NO: 26485 - DNA, 33 bp, Artificial Sequence
  synthetic circulating small noncoding RNA (sncRNA) 5' YRNA-derived fragment
tggctggtccgatggtagtgatttatcagaact

SEQ ID NO: 26486 - DNA, 22 bp, Artificial Sequence
  synthetic circulating small noncoding RNA (sncRNA) 5' YRNA-derived fragment
cccactgcttcacttgactagt

SEQ ID NO: 26487 - DNA, 43 bp, Artificial Sequence
  synthetic circulating small noncoding RNA (sncRNA) 5' YRNA-derived fragment
aaaggctagtcaagtgaagcagtgggagtggagaaggaacaaa

SEQ ID NO: 26488 - DNA, 22 bp, Artificial Sequence
  synthetic circulating small noncoding RNA (sncRNA) 5' YRNA-derived fragment
aagctagtcaaatttagcagtg

SEQ ID NO: 26489 - DNA, 41 bp, Artificial Sequence
  synthetic circulating small noncoding RNA (sncRNA) 5' YRNA-derived fragment
tctttgttccttctccactcccactgcttcacttgactagc

SEQ ID NO: 26490 - DNA, 34 bp, Artificial Sequence
  synthetic circulating small noncoding RNA (sncRNA) 5' YRNA-derived fragment
gctggtccgatggtagtgggttaccagaacttaa

SEQ ID NO: 26491 - DNA, 23 bp, Artificial Sequence
  synthetic circulating small noncoding RNA (sncRNA) 5' YRNA-derived fragment
cgatggtagtgggttaccagaac

SEQ ID NO: 26492 - DNA, 28 bp, Artificial Sequence
  synthetic circulating small noncoding RNA (sncRNA) 5' YRNA-derived fragment
gagtgttgtgggttattgttaagttgat

SEQ ID NO: 26493 - DNA, 23 bp, Artificial Sequence
  synthetic circulating small noncoding RNA (sncRNA) 5' YRNA-derived fragment
ctccccactgctaaatttgacta

SEQ ID NO: 26494 - DNA, 30 bp, Artificial Sequence
  synthetic circulating small noncoding RNA (sncRNA) 5' YRNA-derived fragment
ggctggtccgggtgcagtggtgtttaaaac

SEQ ID NO: 26495 - DNA, 23 bp, Artificial Sequence
  synthetic circulating small noncoding RNA (sncRNA) 5' YRNA-derived fragment
aactcactacctttggaccagac

SEQ ID NO: 26496 - DNA, 20 bp, Artificial Sequence
  synthetic circulating small noncoding RNA (sncRNA) 5' YRNA-derived fragment
caagtgcagtagtgagaagg

SEQ ID NO: 26497 - DNA, 25 bp, Artificial Sequence
  synthetic circulating small noncoding RNA (sncRNA) 5' YRNA-derived fragment
taccaactttagtgacactaatgtt

SEQ ID NO: 26498 - DNA, 20 bp, Artificial Sequence
  synthetic circulating small noncoding RNA (sncRNA) 5' YRNA-derived fragment
cccactcctaaatttgcctg

SEQ ID NO: 26499 - DNA, 32 bp, Artificial Sequence
  synthetic circulating small noncoding RNA (sncRNA) 5' YRNA-derived fragment
ggctggtccaaagggagtgagttatctcattt

SEQ ID NO: 26500 - DNA, 46 bp, Artificial Sequence
  synthetic circulating small noncoding RNA (sncRNA) 5' YRNA-derived fragment
ctagtcaagtgcagtagtgagaaggggggaaagagtagaacaagga

SEQ ID NO: 26501 - DNA, 28 bp, Artificial Sequence
  synthetic circulating small noncoding RNA (sncRNA) 5' YRNA-derived fragment
taagccagtcaaatttagcagtggggga

SEQ ID NO: 26502 - DNA, 32 bp, Artificial Sequence
  synthetic circulating small noncoding RNA (sncRNA) 5' YRNA-derived fragment
cgatggtagtgggttatcagaacttattaaca

SEQ ID NO: 26503 - DNA, 26 bp, Artificial Sequence
  synthetic circulating small noncoding RNA (sncRNA) 5' YRNA-derived fragment
aataagttctgataacccactaccat

SEQ ID NO: 26504 - DNA, 26 bp, Artificial Sequence
  synthetic circulating small noncoding RNA (sncRNA) 5' YRNA-derived fragment
aaggcagtcaaatttagcagtggggg

SEQ ID NO: 26505 - DNA, 18 bp, Artificial Sequence
  synthetic circulating small noncoding RNA (sncRNA) 5' YRNA-derived fragment
agtggattatccgaactt

SEQ ID NO: 26506 - DNA, 32 bp, Artificial Sequence
  synthetic circulating small noncoding RNA (sncRNA) 5' YRNA-derived fragment
ccccccttctcactactgcacttgactagtct

SEQ ID NO: 26507 - DNA, 21 bp, Artificial Sequence
  synthetic circulating small noncoding RNA (sncRNA) 5' YRNA-derived fragment
ttcccactgcttcacttgact

SEQ ID NO: 26508 - DNA, 26 bp, Artificial Sequence
  synthetic circulating small noncoding RNA (sncRNA) 5' YRNA-derived fragment
ggctagtcaagtgaagcagtgggagt

SEQ ID NO: 26509 - DNA, 26 bp, Artificial Sequence
  synthetic circulating small noncoding RNA (sncRNA) 5' YRNA-derived fragment
aatccagtgaaatttagcaatggggg

SEQ ID NO: 26510 - DNA, 41 bp, Artificial Sequence
  synthetic circulating small noncoding RNA (sncRNA) 5' YRNA-derived fragment
gagaaggaacaaagaaatctgtaactggttgtgatcaatta

SEQ ID NO: 26511 - DNA, 29 bp, Artificial Sequence
  synthetic circulating small noncoding RNA (sncRNA) 5' YRNA-derived fragment
aagccagtcaaatttagcagtggggggct

SEQ ID NO: 26512 - DNA, 28 bp, Artificial Sequence
  synthetic circulating small noncoding RNA (sncRNA) 5' YRNA-derived fragment
cactctcactgcttcacttgactagcta

SEQ ID NO: 26513 - DNA, 23 bp, Artificial Sequence
  synthetic circulating small noncoding RNA (sncRNA) 5' YRNA-derived fragment
aactcactacctctggaccagcc

SEQ ID NO: 26514 - DNA, 22 bp, Artificial Sequence
  synthetic circulating small noncoding RNA (sncRNA) 5' YRNA-derived fragment
ggctggtccgaaggtagtgaat

SEQ ID NO: 26515 - DNA, 30 bp, Artificial Sequence
  synthetic circulating small noncoding RNA (sncRNA) 5' YRNA-derived fragment
agctagtcaagtgaagcagtgggagtggag

SEQ ID NO: 26516 - DNA, 31 bp, Artificial Sequence
  synthetic circulating small noncoding RNA (sncRNA) 5' YRNA-derived fragment
aaaagccagtcaaatttagcagtggggggct

SEQ ID NO: 26517 - DNA, 38 bp, Artificial Sequence
  synthetic circulating small noncoding RNA (sncRNA) 5' YRNA-derived fragment
cagttacagatttctttgttccttctccactcccactg

SEQ ID NO: 26518 - DNA, 30 bp, Artificial Sequence
  synthetic circulating small noncoding RNA (sncRNA) 5' YRNA-derived fragment
gttctgataacccactaccattgggccagc

SEQ ID NO: 26519 - DNA, 24 bp, Artificial Sequence
  synthetic circulating small noncoding RNA (sncRNA) 5' YRNA-derived fragment
cccacaaccgcgcttgactagctt

SEQ ID NO: 26520 - DNA, 33 bp, Artificial Sequence
  synthetic circulating small noncoding RNA (sncRNA) 5' YRNA-derived fragment
ggctggtccgaaggtagtgaattatctcaattg

SEQ ID NO: 26521 - DNA, 35 bp, Artificial Sequence
  synthetic circulating small noncoding RNA (sncRNA) 5' YRNA-derived fragment
ggctggtccgatggtagcgggttatcagaacctat

SEQ ID NO: 26522 - DNA, 22 bp, Artificial Sequence
  synthetic circulating small noncoding RNA (sncRNA) 5' YRNA-derived fragment
tcagccagtcaaatttagcagt

SEQ ID NO: 26523 - DNA, 23 bp, Artificial Sequence
  synthetic circulating small noncoding RNA (sncRNA) 5' YRNA-derived fragment
ctcccactgcttcactggacgag

SEQ ID NO: 26524 - DNA, 28 bp, Artificial Sequence
  synthetic circulating small noncoding RNA (sncRNA) 5' YRNA-derived fragment
ggagttcgatctgtaactgactgtgaac

SEQ ID NO: 26525 - DNA, 18 bp, Artificial Sequence
  synthetic circulating small noncoding RNA (sncRNA) 5' YRNA-derived fragment
cttcacttgactagcctt

SEQ ID NO: 26526 - DNA, 26 bp, Artificial Sequence
  synthetic circulating small noncoding RNA (sncRNA) 5' YRNA-derived fragment
gccagtcaaatttagcagtggggggt

SEQ ID NO: 26527 - DNA, 25 bp, Artificial Sequence
  synthetic circulating small noncoding RNA (sncRNA) 5' YRNA-derived fragment
attagtcaagtgcagtagtgagaag

SEQ ID NO: 26528 - DNA, 33 bp, Artificial Sequence
  synthetic circulating small noncoding RNA (sncRNA) 5' YRNA-derived fragment
caattgagataactcactacctttggacaagcc

SEQ ID NO: 26529 - DNA, 27 bp, Artificial Sequence
  synthetic circulating small noncoding RNA (sncRNA) 5' YRNA-derived fragment
ttctcactactgcacttgactagtcta

SEQ ID NO: 26530 - DNA, 23 bp, Artificial Sequence
  synthetic circulating small noncoding RNA (sncRNA) 5' YRNA-derived fragment
cagtcaaatttagcagtggggga

SEQ ID NO: 26531 - DNA, 36 bp, Artificial Sequence
  synthetic circulating small noncoding RNA (sncRNA) 5' YRNA-derived fragment
ggtcctatggtagtgggttatcagaacttattaact

SEQ ID NO: 26532 - DNA, 31 bp, Artificial Sequence
  synthetic circulating small noncoding RNA (sncRNA) 5' YRNA-derived fragment
agctagtcaagtgaagcagtgggagtggaga

SEQ ID NO: 26533 - DNA, 32 bp, Artificial Sequence
  synthetic circulating small noncoding RNA (sncRNA) 5' YRNA-derived fragment
gttctgataacccactaccatcggaccagtcc

SEQ ID NO: 26534 - DNA, 27 bp, Artificial Sequence
  synthetic circulating small noncoding RNA (sncRNA) 5' YRNA-derived fragment
aaagccagccaaatttcgcagtggggg

SEQ ID NO: 26535 - DNA, 30 bp, Artificial Sequence
  synthetic circulating small noncoding RNA (sncRNA) 5' YRNA-derived fragment
ttgagataactcactaccttcagacctgct

SEQ ID NO: 26536 - DNA, 18 bp, Artificial Sequence
  synthetic circulating small noncoding RNA (sncRNA) 5' YRNA-derived fragment
gtagcgggttatcagaac

SEQ ID NO: 26537 - DNA, 29 bp, Artificial Sequence
  synthetic circulating small noncoding RNA (sncRNA) 5' YRNA-derived fragment
tctgataacccactaccatcgaaccagcc

SEQ ID NO: 26538 - DNA, 29 bp, Artificial Sequence
  synthetic circulating small noncoding RNA (sncRNA) 5' YRNA-derived fragment
ctggtcagaaggtagtgagttatctcaat

SEQ ID NO: 26539 - DNA, 24 bp, Artificial Sequence
  synthetic circulating small noncoding RNA (sncRNA) 5' YRNA-derived fragment
gagtagaacaaggagttcgatctg

SEQ ID NO: 26540 - DNA, 18 bp, Artificial Sequence
  synthetic circulating small noncoding RNA (sncRNA) 5' YRNA-derived fragment
ggtccgatggtagtgggt

SEQ ID NO: 26541 - DNA, 35 bp, Artificial Sequence
  synthetic circulating small noncoding RNA (sncRNA) 5' YRNA-derived fragment
cttctccactcccactgcttcacttgactagccta

SEQ ID NO: 26542 - DNA, 23 bp, Artificial Sequence
  synthetic circulating small noncoding RNA (sncRNA) 5' YRNA-derived fragment
gtcttactactgcacttgactag

SEQ ID NO: 26543 - DNA, 20 bp, Artificial Sequence
  synthetic circulating small noncoding RNA (sncRNA) 5' YRNA-derived fragment
tcctcactactgcacttgac

SEQ ID NO: 26544 - DNA, 32 bp, Artificial Sequence
  synthetic circulating small noncoding RNA (sncRNA) 5' YRNA-derived fragment
ggctggtccgagtgcagtggtatttacaacct

SEQ ID NO: 26545 - DNA, 27 bp, Artificial Sequence
  synthetic circulating small noncoding RNA (sncRNA) 5' YRNA-derived fragment
ccatccactgctaaatttggctggctt

SEQ ID NO: 26546 - DNA, 25 bp, Artificial Sequence
  synthetic circulating small noncoding RNA (sncRNA) 5' YRNA-derived fragment
ccccccacaactaaatttgactggc

SEQ ID NO: 26547 - DNA, 24 bp, Artificial Sequence
  synthetic circulating small noncoding RNA (sncRNA) 5' YRNA-derived fragment
aaagccagtcaaatttagcagtgg

SEQ ID NO: 26548 - DNA, 40 bp, Artificial Sequence
  synthetic circulating small noncoding RNA (sncRNA) 5' YRNA-derived fragment
gactagtcaagtgcagtagtgagaaggggggaaagagtag

SEQ ID NO: 26549 - DNA, 32 bp, Artificial Sequence
  synthetic circulating small noncoding RNA (sncRNA) 5' YRNA-derived fragment
ggctagtccgaaggtagagagttatctcagtt

SEQ ID NO: 26550 - DNA, 23 bp, Artificial Sequence
  synthetic circulating small noncoding RNA (sncRNA) 5' YRNA-derived fragment
cccacaaccgcgcttgactagct

SEQ ID NO: 26551 - DNA, 35 bp, Artificial Sequence
  synthetic circulating small noncoding RNA (sncRNA) 5' YRNA-derived fragment
aatcaattgagataactcactaccttcggaccagc

SEQ ID NO: 26552 - DNA, 32 bp, Artificial Sequence
  synthetic circulating small noncoding RNA (sncRNA) 5' YRNA-derived fragment
ggtccgatggtagtgggttatcagaacttact

SEQ ID NO: 26553 - DNA, 30 bp, Artificial Sequence
  synthetic circulating small noncoding RNA (sncRNA) 5' YRNA-derived fragment
aagccattcaaatttagcagtggggggttg

SEQ ID NO: 26554 - DNA, 25 bp, Artificial Sequence
  synthetic circulating small noncoding RNA (sncRNA) 5' YRNA-derived fragment
gccagtcaaatttagcagtggaggg

SEQ ID NO: 26555 - DNA, 30 bp, Artificial Sequence
  synthetic circulating small noncoding RNA (sncRNA) 5' YRNA-derived fragment
agactagtcaagtgaagcagtgggagtgga

SEQ ID NO: 26556 - DNA, 32 bp, Artificial Sequence
  synthetic circulating small noncoding RNA (sncRNA) 5' YRNA-derived fragment
ggctgggccgaaggtagtgagttatctcgatt

SEQ ID NO: 26557 - DNA, 40 bp, Artificial Sequence
  synthetic circulating small noncoding RNA (sncRNA) 5' YRNA-derived fragment
ggctggtccgatggtagtgggttaccagaacttaataaca

SEQ ID NO: 26558 - DNA, 18 bp, Artificial Sequence
  synthetic circulating small noncoding RNA (sncRNA) 5' YRNA-derived fragment
gtagtggattatccgaac

SEQ ID NO: 26559 - DNA, 27 bp, Artificial Sequence
  synthetic circulating small noncoding RNA (sncRNA) 5' YRNA-derived fragment
ctggtccgatggtagtgggttatcaga

SEQ ID NO: 26560 - DNA, 26 bp, Artificial Sequence
  synthetic circulating small noncoding RNA (sncRNA) 5' YRNA-derived fragment
gataacccactaccattggaccagcc

SEQ ID NO: 26561 - DNA, 31 bp, Artificial Sequence
  synthetic circulating small noncoding RNA (sncRNA) 5' YRNA-derived fragment
cctcccactgctaaatttgactggcttatta

SEQ ID NO: 26562 - DNA, 37 bp, Artificial Sequence
  synthetic circulating small noncoding RNA (sncRNA) 5' YRNA-derived fragment
gttccttctccattcccactgcttcacttgactagtt

SEQ ID NO: 26563 - DNA, 31 bp, Artificial Sequence
  synthetic circulating small noncoding RNA (sncRNA) 5' YRNA-derived fragment
ggctagtctgaaggtagtgagttctctcaat

SEQ ID NO: 26564 - DNA, 27 bp, Artificial Sequence
  synthetic circulating small noncoding RNA (sncRNA) 5' YRNA-derived fragment
ctagccagtcaaatttagcagttgggg

SEQ ID NO: 26565 - DNA, 26 bp, Artificial Sequence
  synthetic circulating small noncoding RNA (sncRNA) 5' YRNA-derived fragment
gataactccctaccttcgggccagcc

SEQ ID NO: 26566 - DNA, 39 bp, Artificial Sequence
  synthetic circulating small noncoding RNA (sncRNA) 5' YRNA-derived fragment
gttgataagttctgataacccactactatcggaccagcc

SEQ ID NO: 26567 - DNA, 30 bp, Artificial Sequence
  synthetic circulating small noncoding RNA (sncRNA) 5' YRNA-derived fragment
ttgagataactcactaccctcagactagcc

SEQ ID NO: 26568 - DNA, 32 bp, Artificial Sequence
  synthetic circulating small noncoding RNA (sncRNA) 5' YRNA-derived fragment
tctgtaactgactgtgaacaatcaattgagat

SEQ ID NO: 26569 - DNA, 35 bp, Artificial Sequence
  synthetic circulating small noncoding RNA (sncRNA) 5' YRNA-derived fragment
gactagtcaagtgtagtagtgagaaggtgggaaag

SEQ ID NO: 26570 - DNA, 25 bp, Artificial Sequence
  synthetic circulating small noncoding RNA (sncRNA) 5' YRNA-derived fragment
ttaataagttctgataacccactac

SEQ ID NO: 26571 - DNA, 46 bp, Artificial Sequence
  synthetic circulating small noncoding RNA (sncRNA) 5' YRNA-derived fragment
cacaaccagttacagatttctttgttccttctccactcccactgct

SEQ ID NO: 26572 - DNA, 24 bp, Artificial Sequence
  synthetic circulating small noncoding RNA (sncRNA) 5' YRNA-derived fragment
tccgatggtagtgggttatcagaa

SEQ ID NO: 26573 - DNA, 23 bp, Artificial Sequence
  synthetic circulating small noncoding RNA (sncRNA) 5' YRNA-derived fragment
aacccactactatcggaccagcc

SEQ ID NO: 26574 - DNA, 40 bp, Artificial Sequence
  synthetic circulating small noncoding RNA (sncRNA) 5' YRNA-derived fragment
agactagtcaagtgaagcagtgggagtggagaaggaacaa

SEQ ID NO: 26575 - DNA, 41 bp, Artificial Sequence
  synthetic circulating small noncoding RNA (sncRNA) 5' YRNA-derived fragment
gactagtcaagtgcagtagtgagaaggggggaaagagtaga

SEQ ID NO: 26576 - DNA, 31 bp, Artificial Sequence
  synthetic circulating small noncoding RNA (sncRNA) 5' YRNA-derived fragment
aagctagtcaaatttagcagtggggggttat

SEQ ID NO: 26577 - DNA, 26 bp, Artificial Sequence
  synthetic circulating small noncoding RNA (sncRNA) 5' YRNA-derived fragment
tcccacttcttcacttgactagcctt

SEQ ID NO: 26578 - DNA, 27 bp, Artificial Sequence
  synthetic circulating small noncoding RNA (sncRNA) 5' YRNA-derived fragment
aagccagtcaaatttagcggtgagggt

SEQ ID NO: 26579 - DNA, 29 bp, Artificial Sequence
  synthetic circulating small noncoding RNA (sncRNA) 5' YRNA-derived fragment
tctgataacctactaccatcggaccagcc

SEQ ID NO: 26580 - DNA, 25 bp, Artificial Sequence
  synthetic circulating small noncoding RNA (sncRNA) 5' YRNA-derived fragment
ccactcccactgcttcacttgacta

SEQ ID NO: 26581 - DNA, 25 bp, Artificial Sequence
  synthetic circulating small noncoding RNA (sncRNA) 5' YRNA-derived fragment
ataacccactaccattggaccaggc

SEQ ID NO: 26582 - DNA, 46 bp, Artificial Sequence
  synthetic circulating small noncoding RNA (sncRNA) 5' YRNA-derived fragment
aaagttggtatacaaccccccactgctaaatttgactggcttttta

SEQ ID NO: 26583 - DNA, 21 bp, Artificial Sequence
  synthetic circulating small noncoding RNA (sncRNA) 5' YRNA-derived fragment
ccccccattgctaaatttgac

SEQ ID NO: 26584 - DNA, 31 bp, Artificial Sequence
  synthetic circulating small noncoding RNA (sncRNA) 5' YRNA-derived fragment
gccagtcaaatttagcagtggggggttgtat

SEQ ID NO: 26585 - DNA, 22 bp, Artificial Sequence
  synthetic circulating small noncoding RNA (sncRNA) 5' YRNA-derived fragment
tggtagtgggttatcagaactt

SEQ ID NO: 26586 - DNA, 31 bp, Artificial Sequence
  synthetic circulating small noncoding RNA (sncRNA) 5' YRNA-derived fragment
cagtcaaatttagcagtggggggttgtatac

SEQ ID NO: 26587 - DNA, 28 bp, Artificial Sequence
  synthetic circulating small noncoding RNA (sncRNA) 5' YRNA-derived fragment
ctccccccacaaccgcgcttgactagct

SEQ ID NO: 26588 - DNA, 24 bp, Artificial Sequence
  synthetic circulating small noncoding RNA (sncRNA) 5' YRNA-derived fragment
taagttctgataacccactaccat

SEQ ID NO: 26589 - DNA, 26 bp, Artificial Sequence
  synthetic circulating small noncoding RNA (sncRNA) 5' YRNA-derived fragment
tccgatggtagtgggttatctgaact

SEQ ID NO: 26590 - DNA, 25 bp, Artificial Sequence
  synthetic circulating small noncoding RNA (sncRNA) 5' YRNA-derived fragment
gcttttccgatggtagtgggttatc

SEQ ID NO: 26591 - DNA, 32 bp, Artificial Sequence
  synthetic circulating small noncoding RNA (sncRNA) 5' YRNA-derived fragment
aattttagtgacactaatgttaataagttctg

SEQ ID NO: 26592 - DNA, 28 bp, Artificial Sequence
  synthetic circulating small noncoding RNA (sncRNA) 5' YRNA-derived fragment
ttgtaaacaccactgcactcggaccagc

SEQ ID NO: 26593 - DNA, 29 bp, Artificial Sequence
  synthetic circulating small noncoding RNA (sncRNA) 5' YRNA-derived fragment
tttagtgacactaatgttaataagttctg

SEQ ID NO: 26594 - DNA, 26 bp, Artificial Sequence
  synthetic circulating small noncoding RNA (sncRNA) 5' YRNA-derived fragment
cccactgcttcacttgactagcctta

SEQ ID NO: 26595 - DNA, 24 bp, Artificial Sequence
  synthetic circulating small noncoding RNA (sncRNA) 5' YRNA-derived fragment
tgatggtagtgggttatcaggact

SEQ ID NO: 26596 - DNA, 33 bp, Artificial Sequence
  synthetic circulating small noncoding RNA (sncRNA) 5' YRNA-derived fragment
gggtggtccaatggtagtgggttatcagaactt

SEQ ID NO: 26597 - DNA, 34 bp, Artificial Sequence
  synthetic circulating small noncoding RNA (sncRNA) 5' YRNA-derived fragment
aaggctagccaagtgaagcagtgggagtagagaa

SEQ ID NO: 26598 - DNA, 19 bp, Artificial Sequence
  synthetic circulating small noncoding RNA (sncRNA) 5' YRNA-derived fragment
gtccgatggtagtgggtta

SEQ ID NO: 26599 - DNA, 25 bp, Artificial Sequence
  synthetic circulating small noncoding RNA (sncRNA) 5' YRNA-derived fragment
ttattaacattagtgtcactaaagt

SEQ ID NO: 26600 - DNA, 32 bp, Artificial Sequence
  synthetic circulating small noncoding RNA (sncRNA) 5' YRNA-derived fragment
tctgtaactgactgtgaacaatcaattgagct

SEQ ID NO: 26601 - DNA, 24 bp, Artificial Sequence
  synthetic circulating small noncoding RNA (sncRNA) 5' YRNA-derived fragment
ctcactgcttcacttgactagcct

SEQ ID NO: 26602 - DNA, 25 bp, Artificial Sequence
  synthetic circulating small noncoding RNA (sncRNA) 5' YRNA-derived fragment
actcccactgcttcacttgactagc

SEQ ID NO: 26603 - DNA, 24 bp, Artificial Sequence
  synthetic circulating small noncoding RNA (sncRNA) 5' YRNA-derived fragment
actagtcaagtggagtagtgagaa

SEQ ID NO: 26604 - DNA, 20 bp, Artificial Sequence
  synthetic circulating small noncoding RNA (sncRNA) 5' YRNA-derived fragment
gttgtgggttattgttaagt

SEQ ID NO: 26605 - DNA, 18 bp, Artificial Sequence
  synthetic circulating small noncoding RNA (sncRNA) 5' YRNA-derived fragment
ccgagtgcagtagtgttt

SEQ ID NO: 26606 - DNA, 38 bp, Artificial Sequence
  synthetic circulating small noncoding RNA (sncRNA) 5' YRNA-derived fragment
ctattaagttctgataacccactaccattggaccagcc

SEQ ID NO: 26607 - DNA, 34 bp, Artificial Sequence
  synthetic circulating small noncoding RNA (sncRNA) 5' YRNA-derived fragment
aagccagccaaatttcgcagtggggggttgtata

SEQ ID NO: 26608 - DNA, 31 bp, Artificial Sequence
  synthetic circulating small noncoding RNA (sncRNA) 5' YRNA-derived fragment
ccccccactgctaaatttgactggcttttaa

SEQ ID NO: 26609 - DNA, 26 bp, Artificial Sequence
  synthetic circulating small noncoding RNA (sncRNA) 5' YRNA-derived fragment
gttctgataaccccctaccatgggac

SEQ ID NO: 26610 - DNA, 23 bp, Artificial Sequence
  synthetic circulating small noncoding RNA (sncRNA) 5' YRNA-derived fragment
ggctggtccgaaggtagtgaatt

SEQ ID NO: 26611 - DNA, 39 bp, Artificial Sequence
  synthetic circulating small noncoding RNA (sncRNA) 5' YRNA-derived fragment
tctactctttccccccttctcactactgcacttgactag

SEQ ID NO: 26612 - DNA, 27 bp, Artificial Sequence
  synthetic circulating small noncoding RNA (sncRNA) 5' YRNA-derived fragment
cttctcactactgcacttgagtagtct

SEQ ID NO: 26613 - DNA, 35 bp, Artificial Sequence
  synthetic circulating small noncoding RNA (sncRNA) 5' YRNA-derived fragment
ttaataagttctgataacccactaccatcggacca

SEQ ID NO: 26614 - DNA, 29 bp, Artificial Sequence
  synthetic circulating small noncoding RNA (sncRNA) 5' YRNA-derived fragment
tggtccgatggtagtgatttatcagaact

SEQ ID NO: 26615 - DNA, 18 bp, Artificial Sequence
  synthetic circulating small noncoding RNA (sncRNA) 5' YRNA-derived fragment
gctaaatttaactggctt

SEQ ID NO: 26616 - DNA, 22 bp, Artificial Sequence
  synthetic circulating small noncoding RNA (sncRNA) 5' YRNA-derived fragment
taggctagtcaagtgaagcagt

SEQ ID NO: 26617 - DNA, 40 bp, Artificial Sequence
  synthetic circulating small noncoding RNA (sncRNA) 5' YRNA-derived fragment
ggggaaagagtagaacaaggagttcgatctgtaactgact

SEQ ID NO: 26618 - DNA, 26 bp, Artificial Sequence
  synthetic circulating small noncoding RNA (sncRNA) 5' YRNA-derived fragment
ggctggtccgaatgtagtgagttatc

SEQ ID NO: 26619 - DNA, 24 bp, Artificial Sequence
  synthetic circulating small noncoding RNA (sncRNA) 5' YRNA-derived fragment
cctcccactgctaaatttgactgg

SEQ ID NO: 26620 - DNA, 21 bp, Artificial Sequence
  synthetic circulating small noncoding RNA (sncRNA) 5' YRNA-derived fragment
aagccagtcaagtttagcagt

SEQ ID NO: 26621 - DNA, 32 bp, Artificial Sequence
  synthetic circulating small noncoding RNA (sncRNA) 5' YRNA-derived fragment
tgttctactctttccccccttctcactactgc

SEQ ID NO: 26622 - DNA, 30 bp, Artificial Sequence
  synthetic circulating small noncoding RNA (sncRNA) 5' YRNA-derived fragment
ggctggtcccagtgcagtggtgtttacacc

SEQ ID NO: 26623 - DNA, 26 bp, Artificial Sequence
  synthetic circulating small noncoding RNA (sncRNA) 5' YRNA-derived fragment
tcccactgctgcacttgactagtctt

SEQ ID NO: 26624 - DNA, 34 bp, Artificial Sequence
  synthetic circulating small noncoding RNA (sncRNA) 5' YRNA-derived fragment
ccttctccattcccactgcttcacttgactagtt

SEQ ID NO: 26625 - DNA, 20 bp, Artificial Sequence
  synthetic circulating small noncoding RNA (sncRNA) 5' YRNA-derived fragment
agaaggaacaaagaaatctg

SEQ ID NO: 26626 - DNA, 18 bp, Artificial Sequence
  synthetic circulating small noncoding RNA (sncRNA) 5' YRNA-derived fragment
gattagtgtcactaaagt

SEQ ID NO: 26627 - DNA, 28 bp, Artificial Sequence
  synthetic circulating small noncoding RNA (sncRNA) 5' YRNA-derived fragment
gccagtcaaatttagcagtggggggttg

SEQ ID NO: 26628 - DNA, 28 bp, Artificial Sequence
  synthetic circulating small noncoding RNA (sncRNA) 5' YRNA-derived fragment
ggtctgatggtagtgggttatcagaatt

SEQ ID NO: 26629 - DNA, 34 bp, Artificial Sequence
  synthetic circulating small noncoding RNA (sncRNA) 5' YRNA-derived fragment
gagtagaacaaggagttcgatctgtaactgactg

SEQ ID NO: 26630 - DNA, 26 bp, Artificial Sequence
  synthetic circulating small noncoding RNA (sncRNA) 5' YRNA-derived fragment
ctcccgctgcttcacttgactagcct

SEQ ID NO: 26631 - DNA, 41 bp, Artificial Sequence
  synthetic circulating small noncoding RNA (sncRNA) 5' YRNA-derived fragment
tggctggtccgatggtagtgggttatcagaacttattaaca

SEQ ID NO: 26632 - DNA, 32 bp, Artificial Sequence
  synthetic circulating small noncoding RNA (sncRNA) 5' YRNA-derived fragment
aagttctgataacccactaccatcggaccagt

SEQ ID NO: 26633 - DNA, 21 bp, Artificial Sequence
  synthetic circulating small noncoding RNA (sncRNA) 5' YRNA-derived fragment
ttgagataactcactaccttc

SEQ ID NO: 26634 - DNA, 27 bp, Artificial Sequence
  synthetic circulating small noncoding RNA (sncRNA) 5' YRNA-derived fragment
tgataacccactaccattggacaagcc

SEQ ID NO: 26635 - DNA, 25 bp, Artificial Sequence
  synthetic circulating small noncoding RNA (sncRNA) 5' YRNA-derived fragment
tcccactgcttcacttgaatagcct

SEQ ID NO: 26636 - DNA, 30 bp, Artificial Sequence
  synthetic circulating small noncoding RNA (sncRNA) 5' YRNA-derived fragment
aaaaagactagtcaagtgcagtagtgagaa

SEQ ID NO: 26637 - DNA, 34 bp, Artificial Sequence
  synthetic circulating small noncoding RNA (sncRNA) 5' YRNA-derived fragment
acaaccccccactgctaaatttgactggcttttt

SEQ ID NO: 26638 - DNA, 28 bp, Artificial Sequence
  synthetic circulating small noncoding RNA (sncRNA) 5' YRNA-derived fragment
ggctggtctgatggtagtgggttatcag

SEQ ID NO: 26639 - DNA, 21 bp, Artificial Sequence
  synthetic circulating small noncoding RNA (sncRNA) 5' YRNA-derived fragment
agtcaagtgtagtagtgagaa

SEQ ID NO: 26640 - DNA, 18 bp, Artificial Sequence
  synthetic circulating small noncoding RNA (sncRNA) 5' YRNA-derived fragment
actagtcaagtgtagtag

SEQ ID NO: 26641 - DNA, 32 bp, Artificial Sequence
  synthetic circulating small noncoding RNA (sncRNA) 5' YRNA-derived fragment
tttccgatggtagtgggttatctgaacttatt

SEQ ID NO: 26642 - DNA, 36 bp, Artificial Sequence
  synthetic circulating small noncoding RNA (sncRNA) 5' YRNA-derived fragment
ttatcagaacttattaacattagtgtcactaaagtt

SEQ ID NO: 26643 - DNA, 28 bp, Artificial Sequence
  synthetic circulating small noncoding RNA (sncRNA) 5' YRNA-derived fragment
ataactattaagttctgataacccacta

SEQ ID NO: 26644 - DNA, 26 bp, Artificial Sequence
  synthetic circulating small noncoding RNA (sncRNA) 5' YRNA-derived fragment
accagtcaaatttagcagtggggggt

SEQ ID NO: 26645 - DNA, 40 bp, Artificial Sequence
  synthetic circulating small noncoding RNA (sncRNA) 5' YRNA-derived fragment
gactagtcaagtgtagtagtgagaaggtgggaaagagtag

SEQ ID NO: 26646 - DNA, 37 bp, Artificial Sequence
  synthetic circulating small noncoding RNA (sncRNA) 5' YRNA-derived fragment
ttgttccttctccactcccactgcttcacttgactag

SEQ ID NO: 26647 - DNA, 39 bp, Artificial Sequence
  synthetic circulating small noncoding RNA (sncRNA) 5' YRNA-derived fragment
ttgttccttctccactcccactgcttcacttgactagaa

SEQ ID NO: 26648 - DNA, 26 bp, Artificial Sequence
  synthetic circulating small noncoding RNA (sncRNA) 5' YRNA-derived fragment
ccgagtgttgtgggttattgttaagt

SEQ ID NO: 26649 - DNA, 31 bp, Artificial Sequence
  synthetic circulating small noncoding RNA (sncRNA) 5' YRNA-derived fragment
ttgagttaactcactaccttcggaccagctc

SEQ ID NO: 26650 - DNA, 23 bp, Artificial Sequence
  synthetic circulating small noncoding RNA (sncRNA) 5' YRNA-derived fragment
ggctggtccgaaggtaaggagtt

SEQ ID NO: 26651 - DNA, 25 bp, Artificial Sequence
  synthetic circulating small noncoding RNA (sncRNA) 5' YRNA-derived fragment
agttctcataacctactaccatcag

SEQ ID NO: 26652 - DNA, 27 bp, Artificial Sequence
  synthetic circulating small noncoding RNA (sncRNA) 5' YRNA-derived fragment
aggatagtcaagtgaagcagtgggagt

SEQ ID NO: 26653 - DNA, 24 bp, Artificial Sequence
  synthetic circulating small noncoding RNA (sncRNA) 5' YRNA-derived fragment
agcaccactgcactcagaccagcc

SEQ ID NO: 26654 - DNA, 40 bp, Artificial Sequence
  synthetic circulating small noncoding RNA (sncRNA) 5' YRNA-derived fragment
ggcttgtctgatggtagtgggttatcagaacttattatta

SEQ ID NO: 26655 - DNA, 35 bp, Artificial Sequence
  synthetic circulating small noncoding RNA (sncRNA) 5' YRNA-derived fragment
taaaggctagtcaagtgaagcagtgggagtggaga

SEQ ID NO: 26656 - DNA, 38 bp, Artificial Sequence
  synthetic circulating small noncoding RNA (sncRNA) 5' YRNA-derived fragment
gcttgtctgatggtagtgggttatcagaacttattatt

SEQ ID NO: 26657 - DNA, 28 bp, Artificial Sequence
  synthetic circulating small noncoding RNA (sncRNA) 5' YRNA-derived fragment
cccccaactgctaaatatgagtggcttt

SEQ ID NO: 26658 - DNA, 20 bp, Artificial Sequence
  synthetic circulating small noncoding RNA (sncRNA) 5' YRNA-derived fragment
agtagaacaaggagttcgat

SEQ ID NO: 26659 - DNA, 25 bp, Artificial Sequence
  synthetic circulating small noncoding RNA (sncRNA) 5' YRNA-derived fragment
ataacccactaccttcggacgagcc

SEQ ID NO: 26660 - DNA, 21 bp, Artificial Sequence
  synthetic circulating small noncoding RNA (sncRNA) 5' YRNA-derived fragment
actttagtgacaccaatgtta

SEQ ID NO: 26661 - DNA, 22 bp, Artificial Sequence
  synthetic circulating small noncoding RNA (sncRNA) 5' YRNA-derived fragment
cactgctaaatttgtctggctt

SEQ ID NO: 26662 - DNA, 21 bp, Artificial Sequence
  synthetic circulating small noncoding RNA (sncRNA) 5' YRNA-derived fragment
agtggttcacttgactagcct

SEQ ID NO: 26663 - DNA, 29 bp, Artificial Sequence
  synthetic circulating small noncoding RNA (sncRNA) 5' YRNA-derived fragment
aaaccagtcaaatttagcagtggggggtt

SEQ ID NO: 26664 - DNA, 29 bp, Artificial Sequence
  synthetic circulating small noncoding RNA (sncRNA) 5' YRNA-derived fragment
agttctgataacccactactatcggacca

SEQ ID NO: 26665 - DNA, 25 bp, Artificial Sequence
  synthetic circulating small noncoding RNA (sncRNA) 5' YRNA-derived fragment
taagttctgatagcccactaccatc

SEQ ID NO: 26666 - DNA, 28 bp, Artificial Sequence
  synthetic circulating small noncoding RNA (sncRNA) 5' YRNA-derived fragment
cgcccactgcttcacttgactagccttc

SEQ ID NO: 26667 - DNA, 36 bp, Artificial Sequence
  synthetic circulating small noncoding RNA (sncRNA) 5' YRNA-derived fragment
tcaagtgattgttcacagtcagttacagattgaact

SEQ ID NO: 26668 - DNA, 33 bp, Artificial Sequence
  synthetic circulating small noncoding RNA (sncRNA) 5' YRNA-derived fragment
tttcagtcaaatttagcagtggggggttgtata

SEQ ID NO: 26669 - DNA, 21 bp, Artificial Sequence
  synthetic circulating small noncoding RNA (sncRNA) 5' YRNA-derived fragment
aggctagtcaagtgaagcagt

SEQ ID NO: 26670 - DNA, 22 bp, Artificial Sequence
  synthetic circulating small noncoding RNA (sncRNA) 5' YRNA-derived fragment
tggtccgaaggtagtgagttat

SEQ ID NO: 26671 - DNA, 18 bp, Artificial Sequence
  synthetic circulating small noncoding RNA (sncRNA) 5' YRNA-derived fragment
ctatggtagtgggttatc

SEQ ID NO: 26672 - DNA, 31 bp, Artificial Sequence
  synthetic circulating small noncoding RNA (sncRNA) 5' YRNA-derived fragment
ggctgctccgagtgcagtggtgtttacaact

SEQ ID NO: 26673 - DNA, 22 bp, Artificial Sequence
  synthetic circulating small noncoding RNA (sncRNA) 5' YRNA-derived fragment
gctggtccgatggtagtgggtt

SEQ ID NO: 26674 - DNA, 30 bp, Artificial Sequence
  synthetic circulating small noncoding RNA (sncRNA) 5' YRNA-derived fragment
ggctggtctgaaagtagtgagttatctcaa

SEQ ID NO: 26675 - DNA, 26 bp, Artificial Sequence
  synthetic circulating small noncoding RNA (sncRNA) 5' YRNA-derived fragment
aggctagtccagtgaagcagtaggag

SEQ ID NO: 26676 - DNA, 26 bp, Artificial Sequence
  synthetic circulating small noncoding RNA (sncRNA) 5' YRNA-derived fragment
cctcccactgctaaatttgactggct

SEQ ID NO: 26677 - DNA, 25 bp, Artificial Sequence
  synthetic circulating small noncoding RNA (sncRNA) 5' YRNA-derived fragment
tttcactactgcacttgactagtct

SEQ ID NO: 26678 - DNA, 25 bp, Artificial Sequence
  synthetic circulating small noncoding RNA (sncRNA) 5' YRNA-derived fragment
ttaataagttctgataaccccctac

SEQ ID NO: 26679 - DNA, 30 bp, Artificial Sequence
  synthetic circulating small noncoding RNA (sncRNA) 5' YRNA-derived fragment
agttctgataacccactaccatcagaccag

SEQ ID NO: 26680 - DNA, 26 bp, Artificial Sequence
  synthetic circulating small noncoding RNA (sncRNA) 5' YRNA-derived fragment
acgccagtcaaatttagcggtagggg

SEQ ID NO: 26681 - DNA, 18 bp, Artificial Sequence
  synthetic circulating small noncoding RNA (sncRNA) 5' YRNA-derived fragment
agtgggttatctgaactt

SEQ ID NO: 26682 - DNA, 47 bp, Artificial Sequence
  synthetic circulating small noncoding RNA (sncRNA) 5' YRNA-derived fragment
aggaacaaagaaatctgtaactggttgtgatcaattagttgtaaaca

SEQ ID NO: 26683 - DNA, 28 bp, Artificial Sequence
  synthetic circulating small noncoding RNA (sncRNA) 5' YRNA-derived fragment
aggctagtcaagggaagcagtgggagtg

SEQ ID NO: 26684 - DNA, 21 bp, Artificial Sequence
  synthetic circulating small noncoding RNA (sncRNA) 5' YRNA-derived fragment
tggtagtgggttatcaggact

SEQ ID NO: 26685 - DNA, 26 bp, Artificial Sequence
  synthetic circulating small noncoding RNA (sncRNA) 5' YRNA-derived fragment
ggctggtctgaaggtagtgagttagc

SEQ ID NO: 26686 - DNA, 27 bp, Artificial Sequence
  synthetic circulating small noncoding RNA (sncRNA) 5' YRNA-derived fragment
taagccagtcaaatttatcagaggggg

SEQ ID NO: 26687 - DNA, 20 bp, Artificial Sequence
  synthetic circulating small noncoding RNA (sncRNA) 5' YRNA-derived fragment
tcccagtgcttcacttgact

SEQ ID NO: 26688 - DNA, 30 bp, Artificial Sequence
  synthetic circulating small noncoding RNA (sncRNA) 5' YRNA-derived fragment
cccccccactgctaaatttgactggctttt

SEQ ID NO: 26689 - DNA, 18 bp, Artificial Sequence
  synthetic circulating small noncoding RNA (sncRNA) 5' YRNA-derived fragment
caagtgcagtagtgagaa

SEQ ID NO: 26690 - DNA, 29 bp, Artificial Sequence
  synthetic circulating small noncoding RNA (sncRNA) 5' YRNA-derived fragment
ggctggtctgactgcagtggtgtttacaa

SEQ ID NO: 26691 - DNA, 24 bp, Artificial Sequence
  synthetic circulating small noncoding RNA (sncRNA) 5' YRNA-derived fragment
aggccagtcaagtgaggcagtggg

SEQ ID NO: 26692 - DNA, 27 bp, Artificial Sequence
  synthetic circulating small noncoding RNA (sncRNA) 5' YRNA-derived fragment
ggctggtccgaatgtagtgagttatct

SEQ ID NO: 26693 - DNA, 27 bp, Artificial Sequence
  synthetic circulating small noncoding RNA (sncRNA) 5' YRNA-derived fragment
ctcccattgcttcacttgactagcctt

SEQ ID NO: 26694 - DNA, 33 bp, Artificial Sequence
  synthetic circulating small noncoding RNA (sncRNA) 5' YRNA-derived fragment
ttctccactccctctgcttcacttgactagcct

SEQ ID NO: 26695 - DNA, 28 bp, Artificial Sequence
  synthetic circulating small noncoding RNA (sncRNA) 5' YRNA-derived fragment
tggtctgatggtagtgggttatcagagc

SEQ ID NO: 26696 - DNA, 21 bp, Artificial Sequence
  synthetic circulating small noncoding RNA (sncRNA) 5' YRNA-derived fragment
tggtagtaggttatcagaact

SEQ ID NO: 26697 - DNA, 22 bp, Artificial Sequence
  synthetic circulating small noncoding RNA (sncRNA) 5' YRNA-derived fragment
gatggtagtgggttatcagagc

SEQ ID NO: 26698 - DNA, 29 bp, Artificial Sequence
  synthetic circulating small noncoding RNA (sncRNA) 5' YRNA-derived fragment
gctgatccgaaggtagtgagttatgtcag

SEQ ID NO: 26699 - DNA, 22 bp, Artificial Sequence
  synthetic circulating small noncoding RNA (sncRNA) 5' YRNA-derived fragment
cccactgctgcacttgactagt

SEQ ID NO: 26700 - DNA, 23 bp, Artificial Sequence
  synthetic circulating small noncoding RNA (sncRNA) 5' YRNA-derived fragment
tagtcaaatttagcagtggggac

SEQ ID NO: 26701 - DNA, 29 bp, Artificial Sequence
  synthetic circulating small noncoding RNA (sncRNA) 5' YRNA-derived fragment
cacaaccagttacagatttctttgttcct

SEQ ID NO: 26702 - DNA, 41 bp, Artificial Sequence
  synthetic circulating small noncoding RNA (sncRNA) 5' YRNA-derived fragment
aaggccagtcaagtgaagcagtgggagtggagaaggaacaa

SEQ ID NO: 26703 - DNA, 25 bp, Artificial Sequence
  synthetic circulating small noncoding RNA (sncRNA) 5' YRNA-derived fragment
agactaggcaagtgaagcagtggga

SEQ ID NO: 26704 - DNA, 22 bp, Artificial Sequence
  synthetic circulating small noncoding RNA (sncRNA) 5' YRNA-derived fragment
ttagtgacactaatgttaataa

SEQ ID NO: 26705 - DNA, 24 bp, Artificial Sequence
  synthetic circulating small noncoding RNA (sncRNA) 5' YRNA-derived fragment
ttacaactaattgatcacaaccag

SEQ ID NO: 26706 - DNA, 29 bp, Artificial Sequence
  synthetic circulating small noncoding RNA (sncRNA) 5' YRNA-derived fragment
tctgatgacccactaccatcggaccagcc

SEQ ID NO: 26707 - DNA, 22 bp, Artificial Sequence
  synthetic circulating small noncoding RNA (sncRNA) 5' YRNA-derived fragment
attttagtgacactaatgttaa

SEQ ID NO: 26708 - DNA, 28 bp, Artificial Sequence
  synthetic circulating small noncoding RNA (sncRNA) 5' YRNA-derived fragment
gctctgatagtagtgggttatcagaaca

SEQ ID NO: 26709 - DNA, 33 bp, Artificial Sequence
  synthetic circulating small noncoding RNA (sncRNA) 5' YRNA-derived fragment
gactagtcaagtgcaggagtgagaaggagggaa

SEQ ID NO: 26710 - DNA, 32 bp, Artificial Sequence
  synthetic circulating small noncoding RNA (sncRNA) 5' YRNA-derived fragment
aattgagataactcactacctttggaccagct

SEQ ID NO: 26711 - DNA, 34 bp, Artificial Sequence
  synthetic circulating small noncoding RNA (sncRNA) 5' YRNA-derived fragment
gttaataagttctgataacccactaccatcggac

SEQ ID NO: 26712 - DNA, 27 bp, Artificial Sequence
  synthetic circulating small noncoding RNA (sncRNA) 5' YRNA-derived fragment
accccccacgctaagtttgactggctt

SEQ ID NO: 26713 - DNA, 27 bp, Artificial Sequence
  synthetic circulating small noncoding RNA (sncRNA) 5' YRNA-derived fragment
agttctgataacccattaccattggac

SEQ ID NO: 26714 - DNA, 38 bp, Artificial Sequence
  synthetic circulating small noncoding RNA (sncRNA) 5' YRNA-derived fragment
acaatcaattgagataactcactacctttggaccagac

SEQ ID NO: 26715 - DNA, 22 bp, Artificial Sequence
  synthetic circulating small noncoding RNA (sncRNA) 5' YRNA-derived fragment
attgctaaatttgactggcttt

SEQ ID NO: 26716 - DNA, 25 bp, Artificial Sequence
  synthetic circulating small noncoding RNA (sncRNA) 5' YRNA-derived fragment
aggccagtcaagtgaagcagtggga

SEQ ID NO: 26717 - DNA, 20 bp, Artificial Sequence
  synthetic circulating small noncoding RNA (sncRNA) 5' YRNA-derived fragment
tcgctaccttaggaccagcc

SEQ ID NO: 26718 - DNA, 25 bp, Artificial Sequence
  synthetic circulating small noncoding RNA (sncRNA) 5' YRNA-derived fragment
cccccaactgctaaatttgactggc

SEQ ID NO: 26719 - DNA, 29 bp, Artificial Sequence
  synthetic circulating small noncoding RNA (sncRNA) 5' YRNA-derived fragment
ctggtccaaaggtagtgagttatctcaat

SEQ ID NO: 26720 - DNA, 23 bp, Artificial Sequence
  synthetic circulating small noncoding RNA (sncRNA) 5' YRNA-derived fragment
tagtcaaatttagcagtgggggg

SEQ ID NO: 26721 - DNA, 28 bp, Artificial Sequence
  synthetic circulating small noncoding RNA (sncRNA) 5' YRNA-derived fragment
agcctagtcaattgaagcagtgggagtg

SEQ ID NO: 26722 - DNA, 27 bp, Artificial Sequence
  synthetic circulating small noncoding RNA (sncRNA) 5' YRNA-derived fragment
tagactagtcaagtggagtagtgagaa

SEQ ID NO: 26723 - DNA, 21 bp, Artificial Sequence
  synthetic circulating small noncoding RNA (sncRNA) 5' YRNA-derived fragment
taagttctgataaccccctac

SEQ ID NO: 26724 - DNA, 36 bp, Artificial Sequence
  synthetic circulating small noncoding RNA (sncRNA) 5' YRNA-derived fragment
aataagttctgataacccactaccattggaccaccc

SEQ ID NO: 26725 - DNA, 33 bp, Artificial Sequence
  synthetic circulating small noncoding RNA (sncRNA) 5' YRNA-derived fragment
cctatggtagtgggttatcagaacttattaact

SEQ ID NO: 26726 - DNA, 24 bp, Artificial Sequence
  synthetic circulating small noncoding RNA (sncRNA) 5' YRNA-derived fragment
ttctgataacccactaccatcgga

SEQ ID NO: 26727 - DNA, 25 bp, Artificial Sequence
  synthetic circulating small noncoding RNA (sncRNA) 5' YRNA-derived fragment
agccagtcaaatttatcagaggggg

SEQ ID NO: 26728 - DNA, 33 bp, Artificial Sequence
  synthetic circulating small noncoding RNA (sncRNA) 5' YRNA-derived fragment
cagttgagataactcactacctttggaccagcc

SEQ ID NO: 26729 - DNA, 20 bp, Artificial Sequence
  synthetic circulating small noncoding RNA (sncRNA) 5' YRNA-derived fragment
gccagtaaaatttagcagtg

SEQ ID NO: 26730 - DNA, 27 bp, Artificial Sequence
  synthetic circulating small noncoding RNA (sncRNA) 5' YRNA-derived fragment
tctctcactactgcacttgactagtct

SEQ ID NO: 26731 - DNA, 28 bp, Artificial Sequence
  synthetic circulating small noncoding RNA (sncRNA) 5' YRNA-derived fragment
tagataactcactaccttcagaccagcc

SEQ ID NO: 26732 - DNA, 22 bp, Artificial Sequence
  synthetic circulating small noncoding RNA (sncRNA) 5' YRNA-derived fragment
ccagtcaagtgaagcagtggga

SEQ ID NO: 26733 - DNA, 33 bp, Artificial Sequence
  synthetic circulating small noncoding RNA (sncRNA) 5' YRNA-derived fragment
taataagttctgataacccactaccattggaca

SEQ ID NO: 26734 - DNA, 25 bp, Artificial Sequence
  synthetic circulating small noncoding RNA (sncRNA) 5' YRNA-derived fragment
cttaacaataacccacaacactcag

SEQ ID NO: 26735 - DNA, 32 bp, Artificial Sequence
  synthetic circulating small noncoding RNA (sncRNA) 5' YRNA-derived fragment
ctccattcccacttcttcacttgactagcctt

SEQ ID NO: 26736 - DNA, 30 bp, Artificial Sequence
  synthetic circulating small noncoding RNA (sncRNA) 5' YRNA-derived fragment
aagccagtcaaatttagcagtgggggattg

SEQ ID NO: 26737 - DNA, 38 bp, Artificial Sequence
  synthetic circulating small noncoding RNA (sncRNA) 5' YRNA-derived fragment
ggctggtctgatggtagtgggttatcagaatttattaa

SEQ ID NO: 26738 - DNA, 18 bp, Artificial Sequence
  synthetic circulating small noncoding RNA (sncRNA) 5' YRNA-derived fragment
gtagtgggttatcaggac

SEQ ID NO: 26739 - DNA, 23 bp, Artificial Sequence
  synthetic circulating small noncoding RNA (sncRNA) 5' YRNA-derived fragment
aagccagtcaaatttagcagttg

SEQ ID NO: 26740 - DNA, 21 bp, Artificial Sequence
  synthetic circulating small noncoding RNA (sncRNA) 5' YRNA-derived fragment
ctcactaccttcggaccagcc

SEQ ID NO: 26741 - DNA, 28 bp, Artificial Sequence
  synthetic circulating small noncoding RNA (sncRNA) 5' YRNA-derived fragment
actccttgttctactctttcccccgttc

SEQ ID NO: 26742 - DNA, 34 bp, Artificial Sequence
  synthetic circulating small noncoding RNA (sncRNA) 5' YRNA-derived fragment
atgagttgtaaacaccactgcactcagaccagcc

SEQ ID NO: 26743 - DNA, 32 bp, Artificial Sequence
  synthetic circulating small noncoding RNA (sncRNA) 5' YRNA-derived fragment
agttctgatgagccactaccattggaccagcc

SEQ ID NO: 26744 - DNA, 27 bp, Artificial Sequence
  synthetic circulating small noncoding RNA (sncRNA) 5' YRNA-derived fragment
ttacagatcgaactccttgttctactc

SEQ ID NO: 26745 - DNA, 27 bp, Artificial Sequence
  synthetic circulating small noncoding RNA (sncRNA) 5' YRNA-derived fragment
cttctcactactacacttgactaatct

SEQ ID NO: 26746 - DNA, 28 bp, Artificial Sequence
  synthetic circulating small noncoding RNA (sncRNA) 5' YRNA-derived fragment
cagaacttattcacattagtgttgctaa

SEQ ID NO: 26747 - DNA, 26 bp, Artificial Sequence
  synthetic circulating small noncoding RNA (sncRNA) 5' YRNA-derived fragment
actagtcaagtgtagtagtgagaagg

SEQ ID NO: 26748 - DNA, 33 bp, Artificial Sequence
  synthetic circulating small noncoding RNA (sncRNA) 5' YRNA-derived fragment
ggctgctctgacggtagtggattatccgaactt

SEQ ID NO: 26749 - DNA, 21 bp, Artificial Sequence
  synthetic circulating small noncoding RNA (sncRNA) 5' YRNA-derived fragment
aagttctgagaacccaatacc

SEQ ID NO: 26750 - DNA, 35 bp, Artificial Sequence
  synthetic circulating small noncoding RNA (sncRNA) 5' YRNA-derived fragment
ggtccaatggtagtgggttatcagaacttattaac

SEQ ID NO: 26751 - DNA, 31 bp, Artificial Sequence
  synthetic circulating small noncoding RNA (sncRNA) 5' YRNA-derived fragment
attgagataactcactacgtttggaccagcc

SEQ ID NO: 26752 - DNA, 28 bp, Artificial Sequence
  synthetic circulating small noncoding RNA (sncRNA) 5' YRNA-derived fragment
agttctgataatccactgccattggaca

SEQ ID NO: 26753 - DNA, 26 bp, Artificial Sequence
  synthetic circulating small noncoding RNA (sncRNA) 5' YRNA-derived fragment
ggctgctccaaaggtagtgagttatc

SEQ ID NO: 26754 - DNA, 41 bp, Artificial Sequence
  synthetic circulating small noncoding RNA (sncRNA) 5' YRNA-derived fragment
actagtcaagtgaagcagtgggagtggagaaggaacaaaga

SEQ ID NO: 26755 - DNA, 26 bp, Artificial Sequence
  synthetic circulating small noncoding RNA (sncRNA) 5' YRNA-derived fragment
cgtattaacattagtgtcactaaagt

SEQ ID NO: 26756 - DNA, 26 bp, Artificial Sequence
  synthetic circulating small noncoding RNA (sncRNA) 5' YRNA-derived fragment
cccccccactgctaaatttgactggc

SEQ ID NO: 26757 - DNA, 27 bp, Artificial Sequence
  synthetic circulating small noncoding RNA (sncRNA) 5' YRNA-derived fragment
tagacagtcacatttagtagtgggggg

SEQ ID NO: 26758 - DNA, 26 bp, Artificial Sequence
  synthetic circulating small noncoding RNA (sncRNA) 5' YRNA-derived fragment
taagttctgataacctactacaatgg

SEQ ID NO: 26759 - DNA, 27 bp, Artificial Sequence
  synthetic circulating small noncoding RNA (sncRNA) 5' YRNA-derived fragment
caataacccacaacactcagaccaaca

SEQ ID NO: 26760 - DNA, 27 bp, Artificial Sequence
  synthetic circulating small noncoding RNA (sncRNA) 5' YRNA-derived fragment
ggtccaatggtagtgggttatcagaac

SEQ ID NO: 26761 - DNA, 46 bp, Artificial Sequence
  synthetic circulating small noncoding RNA (sncRNA) 5' YRNA-derived fragment
aagccattcaaatttagcagtggggggttgtatacgaactttagtg

SEQ ID NO: 26762 - DNA, 34 bp, Artificial Sequence
  synthetic circulating small noncoding RNA (sncRNA) 5' YRNA-derived fragment
aagccagtcaaatttagcagtggggtgttgtata

SEQ ID NO: 26763 - DNA, 21 bp, Artificial Sequence
  synthetic circulating small noncoding RNA (sncRNA) 5' YRNA-derived fragment
gccagtcaaatttagcagtgg

SEQ ID NO: 26764 - DNA, 22 bp, Artificial Sequence
  synthetic circulating small noncoding RNA (sncRNA) 5' YRNA-derived fragment
tcactactgcacttgactagtc

SEQ ID NO: 26765 - DNA, 26 bp, Artificial Sequence
  synthetic circulating small noncoding RNA (sncRNA) 5' YRNA-derived fragment
cactagtcaagtgcagtagtgagaag

SEQ ID NO: 26766 - DNA, 29 bp, Artificial Sequence
  synthetic circulating small noncoding RNA (sncRNA) 5' YRNA-derived fragment
ttaagccattcaaatttagcagtgggggg

SEQ ID NO: 26767 - DNA, 25 bp, Artificial Sequence
  synthetic circulating small noncoding RNA (sncRNA) 5' YRNA-derived fragment
ttgatcacaaccagttacagatttc

SEQ ID NO: 26768 - DNA, 26 bp, Artificial Sequence
  synthetic circulating small noncoding RNA (sncRNA) 5' YRNA-derived fragment
tcccactgcttcacttggctagcctt

SEQ ID NO: 26769 - DNA, 27 bp, Artificial Sequence
  synthetic circulating small noncoding RNA (sncRNA) 5' YRNA-derived fragment
aagactagtcaagtgcagtagtgagga

SEQ ID NO: 26770 - DNA, 33 bp, Artificial Sequence
  synthetic circulating small noncoding RNA (sncRNA) 5' YRNA-derived fragment
agtagaacaaggagttcgatctgtaactgactg

SEQ ID NO: 26771 - DNA, 26 bp, Artificial Sequence
  synthetic circulating small noncoding RNA (sncRNA) 5' YRNA-derived fragment
gataactcactatcttcggactaggc

SEQ ID NO: 26772 - DNA, 46 bp, Artificial Sequence
  synthetic circulating small noncoding RNA (sncRNA) 5' YRNA-derived fragment
ctagtcaagtgaagcagtgggagtggagaaggaacaaagaaatctg

SEQ ID NO: 26773 - DNA, 32 bp, Artificial Sequence
  synthetic circulating small noncoding RNA (sncRNA) 5' YRNA-derived fragment
aattgagataactcactacctttggaccaacc

SEQ ID NO: 26774 - DNA, 24 bp, Artificial Sequence
  synthetic circulating small noncoding RNA (sncRNA) 5' YRNA-derived fragment
gactggtccgaaggtagtgagtta

SEQ ID NO: 26775 - DNA, 32 bp, Artificial Sequence
  synthetic circulating small noncoding RNA (sncRNA) 5' YRNA-derived fragment
ttctccactcccactgcttcacttgactagaa

SEQ ID NO: 26776 - DNA, 23 bp, Artificial Sequence
  synthetic circulating small noncoding RNA (sncRNA) 5' YRNA-derived fragment
tagtcatgtgcagtagtgagaag

SEQ ID NO: 26777 - DNA, 24 bp, Artificial Sequence
  synthetic circulating small noncoding RNA (sncRNA) 5' YRNA-derived fragment
ctagtcaagtgaagcagtgggaat

SEQ ID NO: 26778 - DNA, 30 bp, Artificial Sequence
  synthetic circulating small noncoding RNA (sncRNA) 5' YRNA-derived fragment
ttgagataactcactgccttcgaaccagcc

SEQ ID NO: 26779 - DNA, 21 bp, Artificial Sequence
  synthetic circulating small noncoding RNA (sncRNA) 5' YRNA-derived fragment
ttccactgcttcacttgacta

SEQ ID NO: 26780 - DNA, 21 bp, Artificial Sequence
  synthetic circulating small noncoding RNA (sncRNA) 5' YRNA-derived fragment
cccccaactgctaaatttgac

SEQ ID NO: 26781 - DNA, 34 bp, Artificial Sequence
  synthetic circulating small noncoding RNA (sncRNA) 5' YRNA-derived fragment
gagttctgataacccactaccatcggaccagcca

SEQ ID NO: 26782 - DNA, 25 bp, Artificial Sequence
  synthetic circulating small noncoding RNA (sncRNA) 5' YRNA-derived fragment
attagtcaagtgaagcagtgagagt

SEQ ID NO: 26783 - DNA, 32 bp, Artificial Sequence
  synthetic circulating small noncoding RNA (sncRNA) 5' YRNA-derived fragment
ggctggtcccagtgcagtggtgtttacaacta

SEQ ID NO: 26784 - DNA, 26 bp, Artificial Sequence
  synthetic circulating small noncoding RNA (sncRNA) 5' YRNA-derived fragment
tcccactgcttcatttgactagtctt

SEQ ID NO: 26785 - DNA, 18 bp, Artificial Sequence
  synthetic circulating small noncoding RNA (sncRNA) 5' YRNA-derived fragment
ggctggtcctatggtagt

SEQ ID NO: 26786 - DNA, 23 bp, Artificial Sequence
  synthetic circulating small noncoding RNA (sncRNA) 5' YRNA-derived fragment
cccccaactgctaaatttgactg

SEQ ID NO: 26787 - DNA, 27 bp, Artificial Sequence
  synthetic circulating small noncoding RNA (sncRNA) 5' YRNA-derived fragment
gatggtccgaaggtagtgagttatctc

SEQ ID NO: 26788 - DNA, 31 bp, Artificial Sequence
  synthetic circulating small noncoding RNA (sncRNA) 5' YRNA-derived fragment
ggctggtccgggtgcagtggtgtttaaaact

SEQ ID NO: 26789 - DNA, 34 bp, Artificial Sequence
  synthetic circulating small noncoding RNA (sncRNA) 5' YRNA-derived fragment
ccttctccactcccactgcttcacttgactagaa

SEQ ID NO: 26790 - DNA, 32 bp, Artificial Sequence
  synthetic circulating small noncoding RNA (sncRNA) 5' YRNA-derived fragment
gactggtctgaaggtagtgagttgtctcaatt

SEQ ID NO: 26791 - DNA, 25 bp, Artificial Sequence
  synthetic circulating small noncoding RNA (sncRNA) 5' YRNA-derived fragment
tcccccctgctaaatttgactggct

SEQ ID NO: 26792 - DNA, 28 bp, Artificial Sequence
  synthetic circulating small noncoding RNA (sncRNA) 5' YRNA-derived fragment
agtctgatggtagtgggttatcagaact

SEQ ID NO: 26793 - DNA, 20 bp, Artificial Sequence
  synthetic circulating small noncoding RNA (sncRNA) 5' YRNA-derived fragment
aaaccagtcaaatttagcag

SEQ ID NO: 26794 - DNA, 28 bp, Artificial Sequence
  synthetic circulating small noncoding RNA (sncRNA) 5' YRNA-derived fragment
ggtctgatggtagtgggttatcagagct

SEQ ID NO: 26795 - DNA, 23 bp, Artificial Sequence
  synthetic circulating small noncoding RNA (sncRNA) 5' YRNA-derived fragment
gcttaacaataacccacaacact

SEQ ID NO: 26796 - DNA, 31 bp, Artificial Sequence
  synthetic circulating small noncoding RNA (sncRNA) 5' YRNA-derived fragment
acttgtaaacaccactgcactcggaccagcc

SEQ ID NO: 26797 - DNA, 44 bp, Artificial Sequence
  synthetic circulating small noncoding RNA (sncRNA) 5' YRNA-derived fragment
gtcactaaagttggtatacaaccccccactgctaaatttgactg

SEQ ID NO: 26798 - DNA, 23 bp, Artificial Sequence
  synthetic circulating small noncoding RNA (sncRNA) 5' YRNA-derived fragment
cagtcaaatttagcagtgagggg

SEQ ID NO: 26799 - DNA, 23 bp, Artificial Sequence
  synthetic circulating small noncoding RNA (sncRNA) 5' YRNA-derived fragment
tccgatggtagtgggttatcaga

SEQ ID NO: 26800 - DNA, 25 bp, Artificial Sequence
  synthetic circulating small noncoding RNA (sncRNA) 5' YRNA-derived fragment
agccagtcaaatttagcagtagggg

SEQ ID NO: 26801 - DNA, 21 bp, Artificial Sequence
  synthetic circulating small noncoding RNA (sncRNA) 5' YRNA-derived fragment
actactaaatttgactggctt

SEQ ID NO: 26802 - DNA, 22 bp, Artificial Sequence
  synthetic circulating small noncoding RNA (sncRNA) 5' YRNA-derived fragment
gatggtagcgggttatcagaac

SEQ ID NO: 26803 - DNA, 23 bp, Artificial Sequence
  synthetic circulating small noncoding RNA (sncRNA) 5' YRNA-derived fragment
taagccagtcaaatttagcagtg

SEQ ID NO: 26804 - DNA, 18 bp, Artificial Sequence
  synthetic circulating small noncoding RNA (sncRNA) 5' YRNA-derived fragment
aattttagcagtgggggt

SEQ ID NO: 26805 - DNA, 31 bp, Artificial Sequence
  synthetic circulating small noncoding RNA (sncRNA) 5' YRNA-derived fragment
tggtccaatggtagtgggttatcagaactta

SEQ ID NO: 26806 - DNA, 21 bp, Artificial Sequence
  synthetic circulating small noncoding RNA (sncRNA) 5' YRNA-derived fragment
ataagttctgataacccacca

SEQ ID NO: 26807 - DNA, 23 bp, Artificial Sequence
  synthetic circulating small noncoding RNA (sncRNA) 5' YRNA-derived fragment
aacctactaccatcggaccagcc

SEQ ID NO: 26808 - DNA, 29 bp, Artificial Sequence
  synthetic circulating small noncoding RNA (sncRNA) 5' YRNA-derived fragment
ggtctgatggtagtgggttatcaggactt

SEQ ID NO: 26809 - DNA, 19 bp, Artificial Sequence
  synthetic circulating small noncoding RNA (sncRNA) 5' YRNA-derived fragment
tcctcactactgcacttga

SEQ ID NO: 26810 - DNA, 42 bp, Artificial Sequence
  synthetic circulating small noncoding RNA (sncRNA) 5' YRNA-derived fragment
tgttccttctccactcccactgcttcacttgactagcctttt

SEQ ID NO: 26811 - DNA, 20 bp, Artificial Sequence
  synthetic circulating small noncoding RNA (sncRNA) 5' YRNA-derived fragment
gtcaagtgtattagtgagaa

SEQ ID NO: 26812 - DNA, 28 bp, Artificial Sequence
  synthetic circulating small noncoding RNA (sncRNA) 5' YRNA-derived fragment
tttctgataacccactaccatcggacca

SEQ ID NO: 26813 - DNA, 18 bp, Artificial Sequence
  synthetic circulating small noncoding RNA (sncRNA) 5' YRNA-derived fragment
ggcttgtccaaaggtagt

SEQ ID NO: 26814 - DNA, 25 bp, Artificial Sequence
  synthetic circulating small noncoding RNA (sncRNA) 5' YRNA-derived fragment
agccagccaaatttcgcagtggggg

SEQ ID NO: 26815 - DNA, 26 bp, Artificial Sequence
  synthetic circulating small noncoding RNA (sncRNA) 5' YRNA-derived fragment
aggctagccaagtgaagcagtgggag

SEQ ID NO: 26816 - DNA, 22 bp, Artificial Sequence
  synthetic circulating small noncoding RNA (sncRNA) 5' YRNA-derived fragment
tcccactgcttcacttatctag

SEQ ID NO: 26817 - DNA, 23 bp, Artificial Sequence
  synthetic circulating small noncoding RNA (sncRNA) 5' YRNA-derived fragment
aactacctaccttcggaccagcc

SEQ ID NO: 26818 - DNA, 28 bp, Artificial Sequence
  synthetic circulating small noncoding RNA (sncRNA) 5' YRNA-derived fragment
ccggtctgaaggtagtgagttatctcaa

SEQ ID NO: 26819 - DNA, 21 bp, Artificial Sequence
  synthetic circulating small noncoding RNA (sncRNA) 5' YRNA-derived fragment
ctagtcaagggaagcagtggg

SEQ ID NO: 26820 - DNA, 23 bp, Artificial Sequence
  synthetic circulating small noncoding RNA (sncRNA) 5' YRNA-derived fragment
cacttcttcacttgactagcctt

SEQ ID NO: 26821 - DNA, 39 bp, Artificial Sequence
  synthetic circulating small noncoding RNA (sncRNA) 5' YRNA-derived fragment
aggctagtcaagtgaagcagtgggagtggagaaggaaca

SEQ ID NO: 26822 - DNA, 31 bp, Artificial Sequence
  synthetic circulating small noncoding RNA (sncRNA) 5' YRNA-derived fragment
aaaggctagtcaagtgaagcagtgggagtgg

SEQ ID NO: 26823 - DNA, 27 bp, Artificial Sequence
  synthetic circulating small noncoding RNA (sncRNA) 5' YRNA-derived fragment
gttctgataacccactaccattggacc

SEQ ID NO: 26824 - DNA, 22 bp, Artificial Sequence
  synthetic circulating small noncoding RNA (sncRNA) 5' YRNA-derived fragment
atggtagtgggttatcaaaatt

SEQ ID NO: 26825 - DNA, 18 bp, Artificial Sequence
  synthetic circulating small noncoding RNA (sncRNA) 5' YRNA-derived fragment
gttctgataatccactac

SEQ ID NO: 26826 - DNA, 28 bp, Artificial Sequence
  synthetic circulating small noncoding RNA (sncRNA) 5' YRNA-derived fragment
aagactagtcaagtgaagcagtgggagt

SEQ ID NO: 26827 - DNA, 20 bp, Artificial Sequence
  synthetic circulating small noncoding RNA (sncRNA) 5' YRNA-derived fragment
tcaagtgcagtagtgagaag

SEQ ID NO: 26828 - DNA, 33 bp, Artificial Sequence
  synthetic circulating small noncoding RNA (sncRNA) 5' YRNA-derived fragment
ctctttccccccttctcactactgcacttgact

SEQ ID NO: 26829 - DNA, 31 bp, Artificial Sequence
  synthetic circulating small noncoding RNA (sncRNA) 5' YRNA-derived fragment
ttgtctgatggtagtgggttatcagaactta

SEQ ID NO: 26830 - DNA, 23 bp, Artificial Sequence
  synthetic circulating small noncoding RNA (sncRNA) 5' YRNA-derived fragment
agacagtcaaatttagcagtgga

SEQ ID NO: 26831 - DNA, 29 bp, Artificial Sequence
  synthetic circulating small noncoding RNA (sncRNA) 5' YRNA-derived fragment
tggtcctatggtagtgggttatcagaact

SEQ ID NO: 26832 - DNA, 21 bp, Artificial Sequence
  synthetic circulating small noncoding RNA (sncRNA) 5' YRNA-derived fragment
ttctcactactacacttgact

SEQ ID NO: 26833 - DNA, 27 bp, Artificial Sequence
  synthetic circulating small noncoding RNA (sncRNA) 5' YRNA-derived fragment
gttctgataacctactaccatcggacc

SEQ ID NO: 26834 - DNA, 41 bp, Artificial Sequence
  synthetic circulating small noncoding RNA (sncRNA) 5' YRNA-derived fragment
gccagtcaaatttagcagtggggggttgtataccaacttta

SEQ ID NO: 26835 - DNA, 40 bp, Artificial Sequence
  synthetic circulating small noncoding RNA (sncRNA) 5' YRNA-derived fragment
aagccagtcaaatttagcagttgggggttgtatatcaact

SEQ ID NO: 26836 - DNA, 36 bp, Artificial Sequence
  synthetic circulating small noncoding RNA (sncRNA) 5' YRNA-derived fragment
gttaataagttctgataacccactaccatcggacca

SEQ ID NO: 26837 - DNA, 27 bp, Artificial Sequence
  synthetic circulating small noncoding RNA (sncRNA) 5' YRNA-derived fragment
aaggctagtcaagtgaagcaatgggag

SEQ ID NO: 26838 - DNA, 34 bp, Artificial Sequence
  synthetic circulating small noncoding RNA (sncRNA) 5' YRNA-derived fragment
ttgtctgatggtagtgggttatcagaacttatta

SEQ ID NO: 26839 - DNA, 27 bp, Artificial Sequence
  synthetic circulating small noncoding RNA (sncRNA) 5' YRNA-derived fragment
agttctgataacccactaccattggac

SEQ ID NO: 26840 - DNA, 26 bp, Artificial Sequence
  synthetic circulating small noncoding RNA (sncRNA) 5' YRNA-derived fragment
ttcccactgcttcacttcactagcct

SEQ ID NO: 26841 - DNA, 21 bp, Artificial Sequence
  synthetic circulating small noncoding RNA (sncRNA) 5' YRNA-derived fragment
gtctcactactgcacttgact

SEQ ID NO: 26842 - DNA, 18 bp, Artificial Sequence
  synthetic circulating small noncoding RNA (sncRNA) 5' YRNA-derived fragment
actttagtgacgctaatg

SEQ ID NO: 26843 - DNA, 26 bp, Artificial Sequence
  synthetic circulating small noncoding RNA (sncRNA) 5' YRNA-derived fragment
tcccactgcttcacttgaatagcctg

SEQ ID NO: 26844 - DNA, 23 bp, Artificial Sequence
  synthetic circulating small noncoding RNA (sncRNA) 5' YRNA-derived fragment
ttctcactactgcatttgactag

SEQ ID NO: 26845 - DNA, 30 bp, Artificial Sequence
  synthetic circulating small noncoding RNA (sncRNA) 5' YRNA-derived fragment
tttaagccagtcaaatttagcagtggaggg

SEQ ID NO: 26846 - DNA, 19 bp, Artificial Sequence
  synthetic circulating small noncoding RNA (sncRNA) 5' YRNA-derived fragment
agtcaagggaagcagtggg

SEQ ID NO: 26847 - DNA, 32 bp, Artificial Sequence
  synthetic circulating small noncoding RNA (sncRNA) 5' YRNA-derived fragment
tggctggtcagatggtagtgggttatcagaac

SEQ ID NO: 26848 - DNA, 34 bp, Artificial Sequence
  synthetic circulating small noncoding RNA (sncRNA) 5' YRNA-derived fragment
ccttctccactcccactgcttcacttaactagta

SEQ ID NO: 26849 - DNA, 33 bp, Artificial Sequence
  synthetic circulating small noncoding RNA (sncRNA) 5' YRNA-derived fragment
accagaacttattaacattagtgtcactaaagt

SEQ ID NO: 26850 - DNA, 29 bp, Artificial Sequence
  synthetic circulating small noncoding RNA (sncRNA) 5' YRNA-derived fragment
gctgggccgaaggtagtgagttatctcga

SEQ ID NO: 26851 - DNA, 30 bp, Artificial Sequence
  synthetic circulating small noncoding RNA (sncRNA) 5' YRNA-derived fragment
ctggtcagatggtagtgggttatcagaact

SEQ ID NO: 26852 - DNA, 27 bp, Artificial Sequence
  synthetic circulating small noncoding RNA (sncRNA) 5' YRNA-derived fragment
gactagtcaagtgaagcagtgggagtg

SEQ ID NO: 26853 - DNA, 21 bp, Artificial Sequence
  synthetic circulating small noncoding RNA (sncRNA) 5' YRNA-derived fragment
agtgggttatcggaacttatt

SEQ ID NO: 26854 - DNA, 24 bp, Artificial Sequence
  synthetic circulating small noncoding RNA (sncRNA) 5' YRNA-derived fragment
aatagtcaagtgcagtagtgagaa

SEQ ID NO: 26855 - DNA, 23 bp, Artificial Sequence
  synthetic circulating small noncoding RNA (sncRNA) 5' YRNA-derived fragment
cgaatgtagtgagttatctcaat

SEQ ID NO: 26856 - DNA, 26 bp, Artificial Sequence
  synthetic circulating small noncoding RNA (sncRNA) 5' YRNA-derived fragment
cttctcactactgcacttgactagcc

SEQ ID NO: 26857 - DNA, 18 bp, Artificial Sequence
  synthetic circulating small noncoding RNA (sncRNA) 5' YRNA-derived fragment
tactgcacttgactagta

SEQ ID NO: 26858 - DNA, 24 bp, Artificial Sequence
  synthetic circulating small noncoding RNA (sncRNA) 5' YRNA-derived fragment
actagttaagtgcagtagtgagaa

SEQ ID NO: 26859 - DNA, 26 bp, Artificial Sequence
  synthetic circulating small noncoding RNA (sncRNA) 5' YRNA-derived fragment
ctctgactactgcacttgactagtct

SEQ ID NO: 26860 - DNA, 30 bp, Artificial Sequence
  synthetic circulating small noncoding RNA (sncRNA) 5' YRNA-derived fragment
ctggtccgaaggtagtgagttatgtcaatt

SEQ ID NO: 26861 - DNA, 19 bp, Artificial Sequence
  synthetic circulating small noncoding RNA (sncRNA) 5' YRNA-derived fragment
agccagtcaaggttagcag

SEQ ID NO: 26862 - DNA, 25 bp, Artificial Sequence
  synthetic circulating small noncoding RNA (sncRNA) 5' YRNA-derived fragment
agttctcataacccaccaccatcag

SEQ ID NO: 26863 - DNA, 26 bp, Artificial Sequence
  synthetic circulating small noncoding RNA (sncRNA) 5' YRNA-derived fragment
ggctggtccgaaggtggtgagttacc

SEQ ID NO: 26864 - DNA, 24 bp, Artificial Sequence
  synthetic circulating small noncoding RNA (sncRNA) 5' YRNA-derived fragment
actcccactgcttcacttgacttg

SEQ ID NO: 26865 - DNA, 27 bp, Artificial Sequence
  synthetic circulating small noncoding RNA (sncRNA) 5' YRNA-derived fragment
tccgagtgttgtgggttattgttaagt

SEQ ID NO: 26866 - DNA, 29 bp, Artificial Sequence
  synthetic circulating small noncoding RNA (sncRNA) 5' YRNA-derived fragment
ttgagataactcactaccttcggccagct

SEQ ID NO: 26867 - DNA, 29 bp, Artificial Sequence
  synthetic circulating small noncoding RNA (sncRNA) 5' YRNA-derived fragment
ggctggtccgaatgtagtgagttatctca

SEQ ID NO: 26868 - DNA, 31 bp, Artificial Sequence
  synthetic circulating small noncoding RNA (sncRNA) 5' YRNA-derived fragment
ggttatcagaacttattaacattagtgtcac

SEQ ID NO: 26869 - DNA, 29 bp, Artificial Sequence
  synthetic circulating small noncoding RNA (sncRNA) 5' YRNA-derived fragment
ccactcccactgcttcgcttgactagcct

SEQ ID NO: 26870 - DNA, 27 bp, Artificial Sequence
  synthetic circulating small noncoding RNA (sncRNA) 5' YRNA-derived fragment
actttagtgacactaatgttaataagt

SEQ ID NO: 26871 - DNA, 31 bp, Artificial Sequence
  synthetic circulating small noncoding RNA (sncRNA) 5' YRNA-derived fragment
ggctcatctgaaggtagtgagttatctcaat

SEQ ID NO: 26872 - DNA, 23 bp, Artificial Sequence
  synthetic circulating small noncoding RNA (sncRNA) 5' YRNA-derived fragment
agttcgatctgtaactgactgtg

SEQ ID NO: 26873 - DNA, 18 bp, Artificial Sequence
  synthetic circulating small noncoding RNA (sncRNA) 5' YRNA-derived fragment
actaccatcagaccagcc

SEQ ID NO: 26874 - DNA, 25 bp, Artificial Sequence
  synthetic circulating small noncoding RNA (sncRNA) 5' YRNA-derived fragment
acaatggtagtgggttatcagaact

SEQ ID NO: 26875 - DNA, 23 bp, Artificial Sequence
  synthetic circulating small noncoding RNA (sncRNA) 5' YRNA-derived fragment
atcccccctgctaaatttgactg

SEQ ID NO: 26876 - DNA, 35 bp, Artificial Sequence
  synthetic circulating small noncoding RNA (sncRNA) 5' YRNA-derived fragment
tatacaaccccccattgctaaatttgactggcttt

SEQ ID NO: 26877 - DNA, 27 bp, Artificial Sequence
  synthetic circulating small noncoding RNA (sncRNA) 5' YRNA-derived fragment
agactactcaagtgcagtagtgagaag

SEQ ID NO: 26878 - DNA, 36 bp, Artificial Sequence
  synthetic circulating small noncoding RNA (sncRNA) 5' YRNA-derived fragment
cttctccactcccactgcttcacttgactagccttt

SEQ ID NO: 26879 - DNA, 26 bp, Artificial Sequence
  synthetic circulating small noncoding RNA (sncRNA) 5' YRNA-derived fragment
ctagtcaagtgcagtagtgagaaggg

SEQ ID NO: 26880 - DNA, 27 bp, Artificial Sequence
  synthetic circulating small noncoding RNA (sncRNA) 5' YRNA-derived fragment
gatccaaaggtagtgagttatctcaat

SEQ ID NO: 26881 - DNA, 36 bp, Artificial Sequence
  synthetic circulating small noncoding RNA (sncRNA) 5' YRNA-derived fragment
aaaggctagtcaagtgaagcagtgggagtggagaag

SEQ ID NO: 26882 - DNA, 37 bp, Artificial Sequence
  synthetic circulating small noncoding RNA (sncRNA) 5' YRNA-derived fragment
atgttaataagttctgataacccactaccatcggacc

SEQ ID NO: 26883 - DNA, 23 bp, Artificial Sequence
  synthetic circulating small noncoding RNA (sncRNA) 5' YRNA-derived fragment
cagtcaaatttagcagttggggg

SEQ ID NO: 26884 - DNA, 40 bp, Artificial Sequence
  synthetic circulating small noncoding RNA (sncRNA) 5' YRNA-derived fragment
agccagtcaaatttagcagtggggggttgtataccaactt

SEQ ID NO: 26885 - DNA, 36 bp, Artificial Sequence
  synthetic circulating small noncoding RNA (sncRNA) 5' YRNA-derived fragment
tcacagtcagttacagatcgaactccttgttctact

SEQ ID NO: 26886 - DNA, 28 bp, Artificial Sequence
  synthetic circulating small noncoding RNA (sncRNA) 5' YRNA-derived fragment
tcccactgcttcacttgactagcctttt

SEQ ID NO: 26887 - DNA, 32 bp, Artificial Sequence
  synthetic circulating small noncoding RNA (sncRNA) 5' YRNA-derived fragment
aggccagtcaagtgaagcagtgggagtggaga

SEQ ID NO: 26888 - DNA, 27 bp, Artificial Sequence
  synthetic circulating small noncoding RNA (sncRNA) 5' YRNA-derived fragment
gccagtcaaatttagcagtggggggtt

SEQ ID NO: 26889 - DNA, 35 bp, Artificial Sequence
  synthetic circulating small noncoding RNA (sncRNA) 5' YRNA-derived fragment
ggtggtccaatggtagtgggttatcagaacttatt

SEQ ID NO: 26890 - DNA, 29 bp, Artificial Sequence
  synthetic circulating small noncoding RNA (sncRNA) 5' YRNA-derived fragment
ggctggtctgaaggtagtgagttatttca

SEQ ID NO: 26891 - DNA, 45 bp, Artificial Sequence
  synthetic circulating small noncoding RNA (sncRNA) 5' YRNA-derived fragment
tgtctttgttccttctccactcccactgcttcacctgactagcct

SEQ ID NO: 26892 - DNA, 32 bp, Artificial Sequence
  synthetic circulating small noncoding RNA (sncRNA) 5' YRNA-derived fragment
gcttttccgatggtagtgggttatctgaactt

SEQ ID NO: 26893 - DNA, 27 bp, Artificial Sequence
  synthetic circulating small noncoding RNA (sncRNA) 5' YRNA-derived fragment
ggctggtccgatggtagtgggttacca

SEQ ID NO: 26894 - DNA, 29 bp, Artificial Sequence
  synthetic circulating small noncoding RNA (sncRNA) 5' YRNA-derived fragment
tggttcgatggcagtgggttatcagaact

SEQ ID NO: 26895 - DNA, 28 bp, Artificial Sequence
  synthetic circulating small noncoding RNA (sncRNA) 5' YRNA-derived fragment
ggccagtcaagtgaagcagtgggagtgg

SEQ ID NO: 26896 - DNA, 25 bp, Artificial Sequence
  synthetic circulating small noncoding RNA (sncRNA) 5' YRNA-derived fragment
ccttctcactactgcacttgactag

SEQ ID NO: 26897 - DNA, 23 bp, Artificial Sequence
  synthetic circulating small noncoding RNA (sncRNA) 5' YRNA-derived fragment
tagccagtcaaatttagcagttg

SEQ ID NO: 26898 - DNA, 28 bp, Artificial Sequence
  synthetic circulating small noncoding RNA (sncRNA) 5' YRNA-derived fragment
agataactcactaccttcggaccagcca

SEQ ID NO: 26899 - DNA, 25 bp, Artificial Sequence
  synthetic circulating small noncoding RNA (sncRNA) 5' YRNA-derived fragment
ataacctactaccatcagaccagac

SEQ ID NO: 26900 - DNA, 26 bp, Artificial Sequence
  synthetic circulating small noncoding RNA (sncRNA) 5' YRNA-derived fragment
ccccacactgccaaatttgactgtct

SEQ ID NO: 26901 - DNA, 21 bp, Artificial Sequence
  synthetic circulating small noncoding RNA (sncRNA) 5' YRNA-derived fragment
cagctaaatttgactggctta

SEQ ID NO: 26902 - DNA, 29 bp, Artificial Sequence
  synthetic circulating small noncoding RNA (sncRNA) 5' YRNA-derived fragment
ctccactcccactgcttcacttgactagc

SEQ ID NO: 26903 - DNA, 39 bp, Artificial Sequence
  synthetic circulating small noncoding RNA (sncRNA) 5' YRNA-derived fragment
aagactagtcaagtgaagcagtgggagtggagaaggaac

SEQ ID NO: 26904 - DNA, 18 bp, Artificial Sequence
  synthetic circulating small noncoding RNA (sncRNA) 5' YRNA-derived fragment
cagtcaaatttagcagtg

SEQ ID NO: 26905 - DNA, 30 bp, Artificial Sequence
  synthetic circulating small noncoding RNA (sncRNA) 5' YRNA-derived fragment
ccacgcccactgcttcacttgactagcctt

SEQ ID NO: 26906 - DNA, 31 bp, Artificial Sequence
  synthetic circulating small noncoding RNA (sncRNA) 5' YRNA-derived fragment
ccactcccactgcttcgcttgactagcctta

SEQ ID NO: 26907 - DNA, 37 bp, Artificial Sequence
  synthetic circulating small noncoding RNA (sncRNA) 5' YRNA-derived fragment
ggctggtccaatgatagtgggttatcagaacttatta

SEQ ID NO: 26908 - DNA, 28 bp, Artificial Sequence
  synthetic circulating small noncoding RNA (sncRNA) 5' YRNA-derived fragment
tcagtcaaatttagcagtggggggttgt

SEQ ID NO: 26909 - DNA, 28 bp, Artificial Sequence
  synthetic circulating small noncoding RNA (sncRNA) 5' YRNA-derived fragment
ctgataacccactaccattgggccagcc

SEQ ID NO: 26910 - DNA, 30 bp, Artificial Sequence
  synthetic circulating small noncoding RNA (sncRNA) 5' YRNA-derived fragment
gttctgataacccactatcattggaccaaa

SEQ ID NO: 26911 - DNA, 25 bp, Artificial Sequence
  synthetic circulating small noncoding RNA (sncRNA) 5' YRNA-derived fragment
gtattaacattagtgtcactaaagt

SEQ ID NO: 26912 - DNA, 25 bp, Artificial Sequence
  synthetic circulating small noncoding RNA (sncRNA) 5' YRNA-derived fragment
ataacccactaccattggaccaacc

SEQ ID NO: 26913 - DNA, 34 bp, Artificial Sequence
  synthetic circulating small noncoding RNA (sncRNA) 5' YRNA-derived fragment
aagccattcaaatttagcagtggggggttgtata

SEQ ID NO: 26914 - DNA, 45 bp, Artificial Sequence
  synthetic circulating small noncoding RNA (sncRNA) 5' YRNA-derived fragment
ggttgtgatcaattagttgtaaacaccactgcactcggaccagcc

SEQ ID NO: 26915 - DNA, 18 bp, Artificial Sequence
  synthetic circulating small noncoding RNA (sncRNA) 5' YRNA-derived fragment
ggctggtctgaaggtagt

SEQ ID NO: 26916 - DNA, 23 bp, Artificial Sequence
  synthetic circulating small noncoding RNA (sncRNA) 5' YRNA-derived fragment
gttctgataacccactaccattg

SEQ ID NO: 26917 - DNA, 30 bp, Artificial Sequence
  synthetic circulating small noncoding RNA (sncRNA) 5' YRNA-derived fragment
aagttctgagaacccaataccatcagacca

SEQ ID NO: 26918 - DNA, 20 bp, Artificial Sequence
  synthetic circulating small noncoding RNA (sncRNA) 5' YRNA-derived fragment
accagtcaaatttagcagtg

SEQ ID NO: 26919 - DNA, 23 bp, Artificial Sequence
  synthetic circulating small noncoding RNA (sncRNA) 5' YRNA-derived fragment
gttaataagttctgatgacccac

SEQ ID NO: 26920 - DNA, 21 bp, Artificial Sequence
  synthetic circulating small noncoding RNA (sncRNA) 5' YRNA-derived fragment
taccaactttagtgaccctaa

SEQ ID NO: 26921 - DNA, 30 bp, Artificial Sequence
  synthetic circulating small noncoding RNA (sncRNA) 5' YRNA-derived fragment
aagcctagtcaagtgaagcagtgggagtgg

SEQ ID NO: 26922 - DNA, 19 bp, Artificial Sequence
  synthetic circulating small noncoding RNA (sncRNA) 5' YRNA-derived fragment
gactagtcaagtgaagcag

SEQ ID NO: 26923 - DNA, 23 bp, Artificial Sequence
  synthetic circulating small noncoding RNA (sncRNA) 5' YRNA-derived fragment
ggctagtcaagggaagcagtggg

SEQ ID NO: 26924 - DNA, 33 bp, Artificial Sequence
  synthetic circulating small noncoding RNA (sncRNA) 5' YRNA-derived fragment
tgattgagataactcactacctttggaccagcc

SEQ ID NO: 26925 - DNA, 32 bp, Artificial Sequence
  synthetic circulating small noncoding RNA (sncRNA) 5' YRNA-derived fragment
ggtctgatggtagtgggttatcagaatttatt

SEQ ID NO: 26926 - DNA, 20 bp, Artificial Sequence
  synthetic circulating small noncoding RNA (sncRNA) 5' YRNA-derived fragment
cttaacaataacccacaaca

SEQ ID NO: 26927 - DNA, 29 bp, Artificial Sequence
  synthetic circulating small noncoding RNA (sncRNA) 5' YRNA-derived fragment
ccacgcccactgcttcacttgactagcct

SEQ ID NO: 26928 - DNA, 18 bp, Artificial Sequence
  synthetic circulating small noncoding RNA (sncRNA) 5' YRNA-derived fragment
ttaagccagtcaaattta

SEQ ID NO: 26929 - DNA, 25 bp, Artificial Sequence
  synthetic circulating small noncoding RNA (sncRNA) 5' YRNA-derived fragment
taaggctagtcaagtgaagcagtgg

SEQ ID NO: 26930 - DNA, 23 bp, Artificial Sequence
  synthetic circulating small noncoding RNA (sncRNA) 5' YRNA-derived fragment
ctcccactgctaaatttgactgg

SEQ ID NO: 26931 - DNA, 24 bp, Artificial Sequence
  synthetic circulating small noncoding RNA (sncRNA) 5' YRNA-derived fragment
atagtcaagtgcagtagtgaaaag

SEQ ID NO: 26932 - DNA, 19 bp, Artificial Sequence
  synthetic circulating small noncoding RNA (sncRNA) 5' YRNA-derived fragment
tctagtcaagtgaagcagt

SEQ ID NO: 26933 - DNA, 25 bp, Artificial Sequence
  synthetic circulating small noncoding RNA (sncRNA) 5' YRNA-derived fragment
aggctagccaactgaagcagtggga

SEQ ID NO: 26934 - DNA, 32 bp, Artificial Sequence
  synthetic circulating small noncoding RNA (sncRNA) 5' YRNA-derived fragment
ttcagtcaaatttagcagtggggggttgtata

SEQ ID NO: 26935 - DNA, 31 bp, Artificial Sequence
  synthetic circulating small noncoding RNA (sncRNA) 5' YRNA-derived fragment
tacaaccccccattgctaaatttgactggct

SEQ ID NO: 26936 - DNA, 25 bp, Artificial Sequence
  synthetic circulating small noncoding RNA (sncRNA) 5' YRNA-derived fragment
gcctagtcaagtgcagtagtgagaa

SEQ ID NO: 26937 - DNA, 29 bp, Artificial Sequence
  synthetic circulating small noncoding RNA (sncRNA) 5' YRNA-derived fragment
agatggtccgaaggtagtgagttatctca

SEQ ID NO: 26938 - DNA, 20 bp, Artificial Sequence
  synthetic circulating small noncoding RNA (sncRNA) 5' YRNA-derived fragment
cacaaccacgcttgactagc

SEQ ID NO: 26939 - DNA, 27 bp, Artificial Sequence
  synthetic circulating small noncoding RNA (sncRNA) 5' YRNA-derived fragment
aaggctagtcaagtgaagcagtggaag

SEQ ID NO: 26940 - DNA, 31 bp, Artificial Sequence
  synthetic circulating small noncoding RNA (sncRNA) 5' YRNA-derived fragment
ggctggtctgagggcagtggtgtttacgact

SEQ ID NO: 26941 - DNA, 19 bp, Artificial Sequence
  synthetic circulating small noncoding RNA (sncRNA) 5' YRNA-derived fragment
ccgcgcttgactagcttgc

SEQ ID NO: 26942 - DNA, 25 bp, Artificial Sequence
  synthetic circulating small noncoding RNA (sncRNA) 5' YRNA-derived fragment
ggctggtccgagtgcagtagtgttt

SEQ ID NO: 26943 - DNA, 32 bp, Artificial Sequence
  synthetic circulating small noncoding RNA (sncRNA) 5' YRNA-derived fragment
tctccaatcccactgcttcacttgactagcct

SEQ ID NO: 26944 - DNA, 20 bp, Artificial Sequence
  synthetic circulating small noncoding RNA (sncRNA) 5' YRNA-derived fragment
gtgcagtggtgtttacaact

SEQ ID NO: 26945 - DNA, 18 bp, Artificial Sequence
  synthetic circulating small noncoding RNA (sncRNA) 5' YRNA-derived fragment
aactcactatcttcggac

SEQ ID NO: 26946 - DNA, 36 bp, Artificial Sequence
  synthetic circulating small noncoding RNA (sncRNA) 5' YRNA-derived fragment
tttggctagtcaagtgaagcagtgggagtagagaag

SEQ ID NO: 26947 - DNA, 29 bp, Artificial Sequence
  synthetic circulating small noncoding RNA (sncRNA) 5' YRNA-derived fragment
gtttggtccaatggtagtgggttatcaga

SEQ ID NO: 26948 - DNA, 37 bp, Artificial Sequence
  synthetic circulating small noncoding RNA (sncRNA) 5' YRNA-derived fragment
ggttatcggaacttattaacattagtgtcactaaagt

SEQ ID NO: 26949 - DNA, 30 bp, Artificial Sequence
  synthetic circulating small noncoding RNA (sncRNA) 5' YRNA-derived fragment
gtccgatggtagtgggttatcagaacttat

SEQ ID NO: 26950 - DNA, 27 bp, Artificial Sequence
  synthetic circulating small noncoding RNA (sncRNA) 5' YRNA-derived fragment
ggtccgatggtagtgatttatcagaac

SEQ ID NO: 26951 - DNA, 27 bp, Artificial Sequence
  synthetic circulating small noncoding RNA (sncRNA) 5' YRNA-derived fragment
gctagtcaagtgaagcagtgggagtgg

SEQ ID NO: 26952 - DNA, 44 bp, Artificial Sequence
  synthetic circulating small noncoding RNA (sncRNA) 5' YRNA-derived fragment
tcaagtgaagcagtgggagtggagaaggaacaaagaaatatgta

SEQ ID NO: 26953 - DNA, 25 bp, Artificial Sequence
  synthetic circulating small noncoding RNA (sncRNA) 5' YRNA-derived fragment
tgctggtccgagtgcagtggtgttt

SEQ ID NO: 26954 - DNA, 30 bp, Artificial Sequence
  synthetic circulating small noncoding RNA (sncRNA) 5' YRNA-derived fragment
cccctcgctgctaaatttgactggcttttt

SEQ ID NO: 26955 - DNA, 18 bp, Artificial Sequence
  synthetic circulating small noncoding RNA (sncRNA) 5' YRNA-derived fragment
gccagtcaaggttagcag

SEQ ID NO: 26956 - DNA, 18 bp, Artificial Sequence
  synthetic circulating small noncoding RNA (sncRNA) 5' YRNA-derived fragment
ggctggtctgatggtagt

SEQ ID NO: 26957 - DNA, 31 bp, Artificial Sequence
  synthetic circulating small noncoding RNA (sncRNA) 5' YRNA-derived fragment
caaccccccattgctaaatttgactggcttt

SEQ ID NO: 26958 - DNA, 24 bp, Artificial Sequence
  synthetic circulating small noncoding RNA (sncRNA) 5' YRNA-derived fragment
ccgatggtagtgatttatcagaac

SEQ ID NO: 26959 - DNA, 34 bp, Artificial Sequence
  synthetic circulating small noncoding RNA (sncRNA) 5' YRNA-derived fragment
ttaataagttctgataacccactaccatcggacc

SEQ ID NO: 26960 - DNA, 26 bp, Artificial Sequence
  synthetic circulating small noncoding RNA (sncRNA) 5' YRNA-derived fragment
ggctagtctgatggtagtgggttatc

SEQ ID NO: 26961 - DNA, 30 bp, Artificial Sequence
  synthetic circulating small noncoding RNA (sncRNA) 5' YRNA-derived fragment
ccccccttctcactactgcacttgactaaa

SEQ ID NO: 26962 - DNA, 26 bp, Artificial Sequence
  synthetic circulating small noncoding RNA (sncRNA) 5' YRNA-derived fragment
aagttctgataacccactaccatccg

SEQ ID NO: 26963 - DNA, 18 bp, Artificial Sequence
  synthetic circulating small noncoding RNA (sncRNA) 5' YRNA-derived fragment
gtagtgggttatcagaaa

SEQ ID NO: 26964 - DNA, 27 bp, Artificial Sequence
  synthetic circulating small noncoding RNA (sncRNA) 5' YRNA-derived fragment
agactagtcaagtgcagtaatgagaag

SEQ ID NO: 26965 - DNA, 23 bp, Artificial Sequence
  synthetic circulating small noncoding RNA (sncRNA) 5' YRNA-derived fragment
atagtcaagtgaagcagtgggag

SEQ ID NO: 26966 - DNA, 34 bp, Artificial Sequence
  synthetic circulating small noncoding RNA (sncRNA) 5' YRNA-derived fragment
aagccagtcaaatttagcagttgggggttgtata

SEQ ID NO: 26967 - DNA, 31 bp, Artificial Sequence
  synthetic circulating small noncoding RNA (sncRNA) 5' YRNA-derived fragment
attgaggtaactcactaccttagggccagca

SEQ ID NO: 26968 - DNA, 41 bp, Artificial Sequence
  synthetic circulating small noncoding RNA (sncRNA) 5' YRNA-derived fragment
aaaggctagtcaagtgaagcagtgggagtggagaaggaaca

SEQ ID NO: 26969 - DNA, 23 bp, Artificial Sequence
  synthetic circulating small noncoding RNA (sncRNA) 5' YRNA-derived fragment
gcagtcaaatttagcagtggggg

SEQ ID NO: 26970 - DNA, 18 bp, Artificial Sequence
  synthetic circulating small noncoding RNA (sncRNA) 5' YRNA-derived fragment
ggctggtcagaaggtagt

SEQ ID NO: 26971 - DNA, 23 bp, Artificial Sequence
  synthetic circulating small noncoding RNA (sncRNA) 5' YRNA-derived fragment
cacactgcttcacttgactagcc

SEQ ID NO: 26972 - DNA, 20 bp, Artificial Sequence
  synthetic circulating small noncoding RNA (sncRNA) 5' YRNA-derived fragment
aacaaggagttcgatctgta

SEQ ID NO: 26973 - DNA, 21 bp, Artificial Sequence
  synthetic circulating small noncoding RNA (sncRNA) 5' YRNA-derived fragment
accactgcactcggaccagcc

SEQ ID NO: 26974 - DNA, 28 bp, Artificial Sequence
  synthetic circulating small noncoding RNA (sncRNA) 5' YRNA-derived fragment
ggctgatcagatggtagtggattatcaa

SEQ ID NO: 26975 - DNA, 40 bp, Artificial Sequence
  synthetic circulating small noncoding RNA (sncRNA) 5' YRNA-derived fragment
ggagttcgatctgtaactgactgtgaacaatcaattgaga

SEQ ID NO: 26976 - DNA, 33 bp, Artificial Sequence
  synthetic circulating small noncoding RNA (sncRNA) 5' YRNA-derived fragment
aggctagtcaagggaagcagtgggagtggagaa

SEQ ID NO: 26977 - DNA, 20 bp, Artificial Sequence
  synthetic circulating small noncoding RNA (sncRNA) 5' YRNA-derived fragment
tccgatggtagtgggttatc

SEQ ID NO: 26978 - DNA, 31 bp, Artificial Sequence
  synthetic circulating small noncoding RNA (sncRNA) 5' YRNA-derived fragment
aaccccccattgctaaatttgactggctttt

SEQ ID NO: 26979 - DNA, 43 bp, Artificial Sequence
  synthetic circulating small noncoding RNA (sncRNA) 5' YRNA-derived fragment
tagactagtcaagtgcagtagtgagaaagggggaaagagtaga

SEQ ID NO: 26980 - DNA, 32 bp, Artificial Sequence
  synthetic circulating small noncoding RNA (sncRNA) 5' YRNA-derived fragment
aattgagataactcactaccttcagaccagcc

SEQ ID NO: 26981 - DNA, 24 bp, Artificial Sequence
  synthetic circulating small noncoding RNA (sncRNA) 5' YRNA-derived fragment
cttctcactactacacttgactaa

SEQ ID NO: 26982 - DNA, 30 bp, Artificial Sequence
  synthetic circulating small noncoding RNA (sncRNA) 5' YRNA-derived fragment
cttgtctgatggtagtgggttatcagaact

SEQ ID NO: 26983 - DNA, 22 bp, Artificial Sequence
  synthetic circulating small noncoding RNA (sncRNA) 5' YRNA-derived fragment
gtgttgtgggttattgttaagc

SEQ ID NO: 26984 - DNA, 38 bp, Artificial Sequence
  synthetic circulating small noncoding RNA (sncRNA) 5' YRNA-derived fragment
aagccagccaaatttcgcagtggggggttgtataccaa

SEQ ID NO: 26985 - DNA, 30 bp, Artificial Sequence
  synthetic circulating small noncoding RNA (sncRNA) 5' YRNA-derived fragment
aagccagtaaaatttagcagtggggagttg

SEQ ID NO: 26986 - DNA, 31 bp, Artificial Sequence
  synthetic circulating small noncoding RNA (sncRNA) 5' YRNA-derived fragment
tctccactcacactgcttcacttgactagcc

SEQ ID NO: 26987 - DNA, 32 bp, Artificial Sequence
  synthetic circulating small noncoding RNA (sncRNA) 5' YRNA-derived fragment
tacaacctcccactgctatatttgactggcta

SEQ ID NO: 26988 - DNA, 38 bp, Artificial Sequence
  synthetic circulating small noncoding RNA (sncRNA) 5' YRNA-derived fragment
attaataagttctgataacccactaccatcgaaccagc

SEQ ID NO: 26989 - DNA, 23 bp, Artificial Sequence
  synthetic circulating small noncoding RNA (sncRNA) 5' YRNA-derived fragment
aacccactaccattggaccaggc

SEQ ID NO: 26990 - DNA, 21 bp, Artificial Sequence
  synthetic circulating small noncoding RNA (sncRNA) 5' YRNA-derived fragment
aaggcagtcaaatttagcagt

SEQ ID NO: 26991 - DNA, 26 bp, Artificial Sequence
  synthetic circulating small noncoding RNA (sncRNA) 5' YRNA-derived fragment
ttccactgcttcacttgactagcctt

SEQ ID NO: 26992 - DNA, 24 bp, Artificial Sequence
  synthetic circulating small noncoding RNA (sncRNA) 5' YRNA-derived fragment
agtcaagtgaagcagtgggagtgg

SEQ ID NO: 26993 - DNA, 43 bp, Artificial Sequence
  synthetic circulating small noncoding RNA (sncRNA) 5' YRNA-derived fragment
aagccagtaaaatttagcagtggggagttgtataccaacttta

SEQ ID NO: 26994 - DNA, 26 bp, Artificial Sequence
  synthetic circulating small noncoding RNA (sncRNA) 5' YRNA-derived fragment
gggtggtccaatggtagtgggttatc

SEQ ID NO: 26995 - DNA, 28 bp, Artificial Sequence
  synthetic circulating small noncoding RNA (sncRNA) 5' YRNA-derived fragment
tttgataacccactaccatcagaccagc

SEQ ID NO: 26996 - DNA, 20 bp, Artificial Sequence
  synthetic circulating small noncoding RNA (sncRNA) 5' YRNA-derived fragment
gctagtcaagcgtggttgtg

SEQ ID NO: 26997 - DNA, 38 bp, Artificial Sequence
  synthetic circulating small noncoding RNA (sncRNA) 5' YRNA-derived fragment
ctactctttccccccttctcactactgcacttgactag

SEQ ID NO: 26998 - DNA, 19 bp, Artificial Sequence
  synthetic circulating small noncoding RNA (sncRNA) 5' YRNA-derived fragment
ggctggtccgaaggtggtg

SEQ ID NO: 26999 - DNA, 24 bp, Artificial Sequence
  synthetic circulating small noncoding RNA (sncRNA) 5' YRNA-derived fragment
ctagtcaagtggagtagtgagaag

SEQ ID NO: 27000 - DNA, 23 bp, Artificial Sequence
  synthetic circulating small noncoding RNA (sncRNA) 5' YRNA-derived fragment
ctagtcgagtgcagtagtgagaa

SEQ ID NO: 27001 - DNA, 21 bp, Artificial Sequence
  synthetic circulating small noncoding RNA (sncRNA) 5' YRNA-derived fragment
ccccaactgctaaatttgact

SEQ ID NO: 27002 - DNA, 26 bp, Artificial Sequence
  synthetic circulating small noncoding RNA (sncRNA) 5' YRNA-derived fragment
ccccccacaaccacgcttgactagct

SEQ ID NO: 27003 - DNA, 27 bp, Artificial Sequence
  synthetic circulating small noncoding RNA (sncRNA) 5' YRNA-derived fragment
tccccctgtgctaaatttgactgcctt

SEQ ID NO: 27004 - DNA, 28 bp, Artificial Sequence
  synthetic circulating small noncoding RNA (sncRNA) 5' YRNA-derived fragment
ctagccagtcaaatttagcagttggggg

SEQ ID NO: 27005 - DNA, 24 bp, Artificial Sequence
  synthetic circulating small noncoding RNA (sncRNA) 5' YRNA-derived fragment
gctagtcaagtgaagcagtggaag

SEQ ID NO: 27006 - DNA, 31 bp, Artificial Sequence
  synthetic circulating small noncoding RNA (sncRNA) 5' YRNA-derived fragment
actttagtgacacaaatgtgaataagttctg

SEQ ID NO: 27007 - DNA, 28 bp, Artificial Sequence
  synthetic circulating small noncoding RNA (sncRNA) 5' YRNA-derived fragment
taataagttctgataacccactaccatc

SEQ ID NO: 27008 - DNA, 25 bp, Artificial Sequence
  synthetic circulating small noncoding RNA (sncRNA) 5' YRNA-derived fragment
aagccagtcaaatttagcagcaggt

SEQ ID NO: 27009 - DNA, 29 bp, Artificial Sequence
  synthetic circulating small noncoding RNA (sncRNA) 5' YRNA-derived fragment
acccccccactgctaaatttgactggctt

SEQ ID NO: 27010 - DNA, 26 bp, Artificial Sequence
  synthetic circulating small noncoding RNA (sncRNA) 5' YRNA-derived fragment
aggagttcgatctgtaactgactgtg

SEQ ID NO: 27011 - DNA, 30 bp, Artificial Sequence
  synthetic circulating small noncoding RNA (sncRNA) 5' YRNA-derived fragment
cactcccactgcttcacttgactagcctaa

SEQ ID NO: 27012 - DNA, 24 bp, Artificial Sequence
  synthetic circulating small noncoding RNA (sncRNA) 5' YRNA-derived fragment
tgatagtagtgggttatcagaaca

SEQ ID NO: 27013 - DNA, 26 bp, Artificial Sequence
  synthetic circulating small noncoding RNA (sncRNA) 5' YRNA-derived fragment
agactagttaagtgcagtagtgagaa

SEQ ID NO: 27014 - DNA, 21 bp, Artificial Sequence
  synthetic circulating small noncoding RNA (sncRNA) 5' YRNA-derived fragment
agtcaagtgcaggagtgagaa

SEQ ID NO: 27015 - DNA, 20 bp, Artificial Sequence
  synthetic circulating small noncoding RNA (sncRNA) 5' YRNA-derived fragment
tgttctgataacccattacc

SEQ ID NO: 27016 - DNA, 23 bp, Artificial Sequence
  synthetic circulating small noncoding RNA (sncRNA) 5' YRNA-derived fragment
ctagtcaagtgaagcaatgaggg

SEQ ID NO: 27017 - DNA, 22 bp, Artificial Sequence
  synthetic circulating small noncoding RNA (sncRNA) 5' YRNA-derived fragment
atggtagcgggttatcagaacc

SEQ ID NO: 27018 - DNA, 25 bp, Artificial Sequence
  synthetic circulating small noncoding RNA (sncRNA) 5' YRNA-derived fragment
ctcccactgcttcacttaactagta

SEQ ID NO: 27019 - DNA, 29 bp, Artificial Sequence
  synthetic circulating small noncoding RNA (sncRNA) 5' YRNA-derived fragment
tggtacaatggtagtgggttatcagaact

SEQ ID NO: 27020 - DNA, 29 bp, Artificial Sequence
  synthetic circulating small noncoding RNA (sncRNA) 5' YRNA-derived fragment
tagccagtcagattttagcagtggggggt

SEQ ID NO: 27021 - DNA, 23 bp, Artificial Sequence
  synthetic circulating small noncoding RNA (sncRNA) 5' YRNA-derived fragment
tactagtcaagtgaaacagtggg

SEQ ID NO: 27022 - DNA, 28 bp, Artificial Sequence
  synthetic circulating small noncoding RNA (sncRNA) 5' YRNA-derived fragment
agttacagatcgaactccttgttctact

SEQ ID NO: 27023 - DNA, 25 bp, Artificial Sequence
  synthetic circulating small noncoding RNA (sncRNA) 5' YRNA-derived fragment
ttctcactgctgcacttgactagac

SEQ ID NO: 27024 - DNA, 36 bp, Artificial Sequence
  synthetic circulating small noncoding RNA (sncRNA) 5' YRNA-derived fragment
ctagtcaagtgaagcagtgggagtggagaaggaaca

SEQ ID NO: 27025 - DNA, 26 bp, Artificial Sequence
  synthetic circulating small noncoding RNA (sncRNA) 5' YRNA-derived fragment
ggctgctctgaaggtagtgagttatc

SEQ ID NO: 27026 - DNA, 27 bp, Artificial Sequence
  synthetic circulating small noncoding RNA (sncRNA) 5' YRNA-derived fragment
gttctcactactgcacttgactagtct

SEQ ID NO: 27027 - DNA, 29 bp, Artificial Sequence
  synthetic circulating small noncoding RNA (sncRNA) 5' YRNA-derived fragment
aactagtcaagtgtagtcgtgagaagggg

SEQ ID NO: 27028 - DNA, 26 bp, Artificial Sequence
  synthetic circulating small noncoding RNA (sncRNA) 5' YRNA-derived fragment
agtagtgagaaggggggaaagagtag

SEQ ID NO: 27029 - DNA, 24 bp, Artificial Sequence
  synthetic circulating small noncoding RNA (sncRNA) 5' YRNA-derived fragment
tacaccactgcactcagaccagcc

SEQ ID NO: 27030 - DNA, 32 bp, Artificial Sequence
  synthetic circulating small noncoding RNA (sncRNA) 5' YRNA-derived fragment
taagttctgataacccactaccatcggaccag

SEQ ID NO: 27031 - DNA, 39 bp, Artificial Sequence
  synthetic circulating small noncoding RNA (sncRNA) 5' YRNA-derived fragment
agactagtcaagtgcagtagtgagaaggggggaaagagt

SEQ ID NO: 27032 - DNA, 18 bp, Artificial Sequence
  synthetic circulating small noncoding RNA (sncRNA) 5' YRNA-derived fragment
aaggctagtcaagtgaag

SEQ ID NO: 27033 - DNA, 19 bp, Artificial Sequence
  synthetic circulating small noncoding RNA (sncRNA) 5' YRNA-derived fragment
cactgcttcacttgactag

SEQ ID NO: 27034 - DNA, 18 bp, Artificial Sequence
  synthetic circulating small noncoding RNA (sncRNA) 5' YRNA-derived fragment
ccctaccatgggaccaac

SEQ ID NO: 27035 - DNA, 19 bp, Artificial Sequence
  synthetic circulating small noncoding RNA (sncRNA) 5' YRNA-derived fragment
agattagtgtcactaaagt

SEQ ID NO: 27036 - DNA, 25 bp, Artificial Sequence
  synthetic circulating small noncoding RNA (sncRNA) 5' YRNA-derived fragment
tcccagtgcttcacttgactagcct

SEQ ID NO: 27037 - DNA, 26 bp, Artificial Sequence
  synthetic circulating small noncoding RNA (sncRNA) 5' YRNA-derived fragment
ctcccattgcttcacttgactagcct

SEQ ID NO: 27038 - DNA, 20 bp, Artificial Sequence
  synthetic circulating small noncoding RNA (sncRNA) 5' YRNA-derived fragment
agttctgatgacccactacc

SEQ ID NO: 27039 - DNA, 37 bp, Artificial Sequence
  synthetic circulating small noncoding RNA (sncRNA) 5' YRNA-derived fragment
actttagtgacactaatgttaataagttctgataacc

SEQ ID NO: 27040 - DNA, 35 bp, Artificial Sequence
  synthetic circulating small noncoding RNA (sncRNA) 5' YRNA-derived fragment
ggctggtctgatggtagtgggttatcagaatttat

SEQ ID NO: 27041 - DNA, 32 bp, Artificial Sequence
  synthetic circulating small noncoding RNA (sncRNA) 5' YRNA-derived fragment
tctccactcccactgcttcacttgaatagcct

SEQ ID NO: 27042 - DNA, 22 bp, Artificial Sequence
  synthetic circulating small noncoding RNA (sncRNA) 5' YRNA-derived fragment
ggctggtccaatggtagtggtt

SEQ ID NO: 27043 - DNA, 25 bp, Artificial Sequence
  synthetic circulating small noncoding RNA (sncRNA) 5' YRNA-derived fragment
cactagtcaagtgaagcagttggag

SEQ ID NO: 27044 - DNA, 25 bp, Artificial Sequence
  synthetic circulating small noncoding RNA (sncRNA) 5' YRNA-derived fragment
gataactcactatcttcggaccaac

SEQ ID NO: 27045 - DNA, 27 bp, Artificial Sequence
  synthetic circulating small noncoding RNA (sncRNA) 5' YRNA-derived fragment
actcccactgcttcacttgactagact

SEQ ID NO: 27046 - DNA, 19 bp, Artificial Sequence
  synthetic circulating small noncoding RNA (sncRNA) 5' YRNA-derived fragment
gactagtcaagggcagtag

SEQ ID NO: 27047 - DNA, 29 bp, Artificial Sequence
  synthetic circulating small noncoding RNA (sncRNA) 5' YRNA-derived fragment
cactcccactgcttcacttgactaccctt

SEQ ID NO: 27048 - DNA, 33 bp, Artificial Sequence
  synthetic circulating small noncoding RNA (sncRNA) 5' YRNA-derived fragment
acaaccccccactgctaaatttgactggcttta

SEQ ID NO: 27049 - DNA, 25 bp, Artificial Sequence
  synthetic circulating small noncoding RNA (sncRNA) 5' YRNA-derived fragment
aggctagtcaagagaagcagtggga

SEQ ID NO: 27050 - DNA, 24 bp, Artificial Sequence
  synthetic circulating small noncoding RNA (sncRNA) 5' YRNA-derived fragment
cccccaactgctaaatttgactgg

SEQ ID NO: 27051 - DNA, 30 bp, Artificial Sequence
  synthetic circulating small noncoding RNA (sncRNA) 5' YRNA-derived fragment
ttgagataactcactacctttggaccagct

SEQ ID NO: 27052 - DNA, 29 bp, Artificial Sequence
  synthetic circulating small noncoding RNA (sncRNA) 5' YRNA-derived fragment
ttgagataactcactacctttggaccagc

SEQ ID NO: 27053 - DNA, 31 bp, Artificial Sequence
  synthetic circulating small noncoding RNA (sncRNA) 5' YRNA-derived fragment
aagccagtcaaatttagcagttgggggttgt

SEQ ID NO: 27054 - DNA, 26 bp, Artificial Sequence
  synthetic circulating small noncoding RNA (sncRNA) 5' YRNA-derived fragment
cccccaactactaaatttgactggct

SEQ ID NO: 27055 - DNA, 20 bp, Artificial Sequence
  synthetic circulating small noncoding RNA (sncRNA) 5' YRNA-derived fragment
aggttgtgggttattgttaa

SEQ ID NO: 27056 - DNA, 27 bp, Artificial Sequence
  synthetic circulating small noncoding RNA (sncRNA) 5' YRNA-derived fragment
ctcccactgctttacttaactagcctt

SEQ ID NO: 27057 - DNA, 25 bp, Artificial Sequence
  synthetic circulating small noncoding RNA (sncRNA) 5' YRNA-derived fragment
cagtgggagtggagaaggaacaaag

SEQ ID NO: 27058 - DNA, 27 bp, Artificial Sequence
  synthetic circulating small noncoding RNA (sncRNA) 5' YRNA-derived fragment
aaagccagttaaatttagcagtcaggg

SEQ ID NO: 27059 - DNA, 27 bp, Artificial Sequence
  synthetic circulating small noncoding RNA (sncRNA) 5' YRNA-derived fragment
aacattagtgtcactgcagttggtata

SEQ ID NO: 27060 - DNA, 22 bp, Artificial Sequence
  synthetic circulating small noncoding RNA (sncRNA) 5' YRNA-derived fragment
tttagcagtggggggttgtata

SEQ ID NO: 27061 - DNA, 27 bp, Artificial Sequence
  synthetic circulating small noncoding RNA (sncRNA) 5' YRNA-derived fragment
gtccaatggtagtggtttatcagaact

SEQ ID NO: 27062 - DNA, 39 bp, Artificial Sequence
  synthetic circulating small noncoding RNA (sncRNA) 5' YRNA-derived fragment
ggtccgatggtagtgggttatcagaacttattaacattt

SEQ ID NO: 27063 - DNA, 28 bp, Artificial Sequence
  synthetic circulating small noncoding RNA (sncRNA) 5' YRNA-derived fragment
tgtggtagtgggttatcagaacttatta

SEQ ID NO: 27064 - DNA, 28 bp, Artificial Sequence
  synthetic circulating small noncoding RNA (sncRNA) 5' YRNA-derived fragment
gtttggtccaatggtagtgggttatcag

SEQ ID NO: 27065 - DNA, 30 bp, Artificial Sequence
  synthetic circulating small noncoding RNA (sncRNA) 5' YRNA-derived fragment
attgagctaactacctaccttcggaccagc

SEQ ID NO: 27066 - DNA, 20 bp, Artificial Sequence
  synthetic circulating small noncoding RNA (sncRNA) 5' YRNA-derived fragment
aatttctgataacccactac

SEQ ID NO: 27067 - DNA, 29 bp, Artificial Sequence
  synthetic circulating small noncoding RNA (sncRNA) 5' YRNA-derived fragment
aaaaggcagtcaaatttagcagtgggggt

SEQ ID NO: 27068 - DNA, 25 bp, Artificial Sequence
  synthetic circulating small noncoding RNA (sncRNA) 5' YRNA-derived fragment
cccaactgctaaatttgactggctt

SEQ ID NO: 27069 - DNA, 28 bp, Artificial Sequence
  synthetic circulating small noncoding RNA (sncRNA) 5' YRNA-derived fragment
gagctaactcactacctttggacgagca

SEQ ID NO: 27070 - DNA, 28 bp, Artificial Sequence
  synthetic circulating small noncoding RNA (sncRNA) 5' YRNA-derived fragment
aagttctgatgacccactaccatcggac

SEQ ID NO: 27071 - DNA, 25 bp, Artificial Sequence
  synthetic circulating small noncoding RNA (sncRNA) 5' YRNA-derived fragment
agactagtcaagtgcaggagtgaga

SEQ ID NO: 27072 - DNA, 31 bp, Artificial Sequence
  synthetic circulating small noncoding RNA (sncRNA) 5' YRNA-derived fragment
cttctcactactgcacttgactagtctttaa

SEQ ID NO: 27073 - DNA, 24 bp, Artificial Sequence
  synthetic circulating small noncoding RNA (sncRNA) 5' YRNA-derived fragment
agaactactgcactcagaccagcc

SEQ ID NO: 27074 - DNA, 23 bp, Artificial Sequence
  synthetic circulating small noncoding RNA (sncRNA) 5' YRNA-derived fragment
tctcactactgcacttgactagt

SEQ ID NO: 27075 - DNA, 24 bp, Artificial Sequence
  synthetic circulating small noncoding RNA (sncRNA) 5' YRNA-derived fragment
gggttatcagaacttattaacttt

SEQ ID NO: 27076 - DNA, 34 bp, Artificial Sequence
  synthetic circulating small noncoding RNA (sncRNA) 5' YRNA-derived fragment
ggctggtctgaaggtagtgagttagctcaattga

SEQ ID NO: 27077 - DNA, 34 bp, Artificial Sequence
  synthetic circulating small noncoding RNA (sncRNA) 5' YRNA-derived fragment
aaagctagtcaagtgaagcagtgggagtggagaa

SEQ ID NO: 27078 - DNA, 21 bp, Artificial Sequence
  synthetic circulating small noncoding RNA (sncRNA) 5' YRNA-derived fragment
gttaataagttctgataaccc

SEQ ID NO: 27079 - DNA, 23 bp, Artificial Sequence
  synthetic circulating small noncoding RNA (sncRNA) 5' YRNA-derived fragment
cagtcaaatttatcagagggggg

SEQ ID NO: 27080 - DNA, 31 bp, Artificial Sequence
  synthetic circulating small noncoding RNA (sncRNA) 5' YRNA-derived fragment
ttgagataactcactaccttcagaccagccc

SEQ ID NO: 27081 - DNA, 29 bp, Artificial Sequence
  synthetic circulating small noncoding RNA (sncRNA) 5' YRNA-derived fragment
caacccccaactgctaaatttgactggct

SEQ ID NO: 27082 - DNA, 28 bp, Artificial Sequence
  synthetic circulating small noncoding RNA (sncRNA) 5' YRNA-derived fragment
ccccccattgctaaattggactggattt

SEQ ID NO: 27083 - DNA, 30 bp, Artificial Sequence
  synthetic circulating small noncoding RNA (sncRNA) 5' YRNA-derived fragment
ataagttctgataacccactaccatcggac

SEQ ID NO: 27084 - DNA, 37 bp, Artificial Sequence
  synthetic circulating small noncoding RNA (sncRNA) 5' YRNA-derived fragment
cggctggtccgatggtagtgggttatcagaacttatt

SEQ ID NO: 27085 - DNA, 36 bp, Artificial Sequence
  synthetic circulating small noncoding RNA (sncRNA) 5' YRNA-derived fragment
cagtcaaatttagcagtggggggttgtataccaact

SEQ ID NO: 27086 - DNA, 29 bp, Artificial Sequence
  synthetic circulating small noncoding RNA (sncRNA) 5' YRNA-derived fragment
aaaagactagtcaagtgcagtagtgagaa

SEQ ID NO: 27087 - DNA, 22 bp, Artificial Sequence
  synthetic circulating small noncoding RNA (sncRNA) 5' YRNA-derived fragment
gccagtcaaatttagcagtgag

SEQ ID NO: 27088 - DNA, 25 bp, Artificial Sequence
  synthetic circulating small noncoding RNA (sncRNA) 5' YRNA-derived fragment
cccccactgctaaattttactagct

SEQ ID NO: 27089 - DNA, 24 bp, Artificial Sequence
  synthetic circulating small noncoding RNA (sncRNA) 5' YRNA-derived fragment
taaaccactgcactcggaccagcc

SEQ ID NO: 27090 - DNA, 27 bp, Artificial Sequence
  synthetic circulating small noncoding RNA (sncRNA) 5' YRNA-derived fragment
atcgaactccttgttctactctttccc

SEQ ID NO: 27091 - DNA, 30 bp, Artificial Sequence
  synthetic circulating small noncoding RNA (sncRNA) 5' YRNA-derived fragment
ggctgctccgagtgcagtggtgtttacaac

SEQ ID NO: 27092 - DNA, 23 bp, Artificial Sequence
  synthetic circulating small noncoding RNA (sncRNA) 5' YRNA-derived fragment
cccccacaaccacgcttgactag

SEQ ID NO: 27093 - DNA, 29 bp, Artificial Sequence
  synthetic circulating small noncoding RNA (sncRNA) 5' YRNA-derived fragment
atacaaccccccactgctaaatttgactg

SEQ ID NO: 27094 - DNA, 24 bp, Artificial Sequence
  synthetic circulating small noncoding RNA (sncRNA) 5' YRNA-derived fragment
cctttcactactgcacttgactag

SEQ ID NO: 27095 - DNA, 23 bp, Artificial Sequence
  synthetic circulating small noncoding RNA (sncRNA) 5' YRNA-derived fragment
agtagaacaaggagttcgatctg

SEQ ID NO: 27096 - DNA, 33 bp, Artificial Sequence
  synthetic circulating small noncoding RNA (sncRNA) 5' YRNA-derived fragment
taggctagtcaagtgaagcagtgggagtggaaa

SEQ ID NO: 27097 - DNA, 21 bp, Artificial Sequence
  synthetic circulating small noncoding RNA (sncRNA) 5' YRNA-derived fragment
agtcaagtgaagcagtcggag

SEQ ID NO: 27098 - DNA, 27 bp, Artificial Sequence
  synthetic circulating small noncoding RNA (sncRNA) 5' YRNA-derived fragment
cccccattgctaaattggactggattt

SEQ ID NO: 27099 - DNA, 24 bp, Artificial Sequence
  synthetic circulating small noncoding RNA (sncRNA) 5' YRNA-derived fragment
agttctgataacctactacaatgg

SEQ ID NO: 27100 - DNA, 22 bp, Artificial Sequence
  synthetic circulating small noncoding RNA (sncRNA) 5' YRNA-derived fragment
aaccagtcaaatttagcagtgg

SEQ ID NO: 27101 - DNA, 20 bp, Artificial Sequence
  synthetic circulating small noncoding RNA (sncRNA) 5' YRNA-derived fragment
agacagtcaaatttagcagt

SEQ ID NO: 27102 - DNA, 22 bp, Artificial Sequence
  synthetic circulating small noncoding RNA (sncRNA) 5' YRNA-derived fragment
tcccactgcttcacttcactag

SEQ ID NO: 27103 - DNA, 30 bp, Artificial Sequence
  synthetic circulating small noncoding RNA (sncRNA) 5' YRNA-derived fragment
ctgagataactcactaccttcagagcagcc

SEQ ID NO: 27104 - DNA, 37 bp, Artificial Sequence
  synthetic circulating small noncoding RNA (sncRNA) 5' YRNA-derived fragment
ggcttttccgatggtagtgggttatctgaacttatta

SEQ ID NO: 27105 - DNA, 29 bp, Artificial Sequence
  synthetic circulating small noncoding RNA (sncRNA) 5' YRNA-derived fragment
ccccccttctcactactgcacttgactag

SEQ ID NO: 27106 - DNA, 28 bp, Artificial Sequence
  synthetic circulating small noncoding RNA (sncRNA) 5' YRNA-derived fragment
gttctgataacccactaccatcgaacca

SEQ ID NO: 27107 - DNA, 29 bp, Artificial Sequence
  synthetic circulating small noncoding RNA (sncRNA) 5' YRNA-derived fragment
aaagccagtcaaatttagcagtggggggc

SEQ ID NO: 27108 - DNA, 34 bp, Artificial Sequence
  synthetic circulating small noncoding RNA (sncRNA) 5' YRNA-derived fragment
actagtcaagtgcagtagtgagaaggggggaaag

SEQ ID NO: 27109 - DNA, 25 bp, Artificial Sequence
  synthetic circulating small noncoding RNA (sncRNA) 5' YRNA-derived fragment
cggctggtccgagtgcagtggtgtt

SEQ ID NO: 27110 - DNA, 20 bp, Artificial Sequence
  synthetic circulating small noncoding RNA (sncRNA) 5' YRNA-derived fragment
ctactgcacttgactagtct

SEQ ID NO: 27111 - DNA, 21 bp, Artificial Sequence
  synthetic circulating small noncoding RNA (sncRNA) 5' YRNA-derived fragment
gtcaagtgtagtagtgagaag

SEQ ID NO: 27112 - DNA, 19 bp, Artificial Sequence
  synthetic circulating small noncoding RNA (sncRNA) 5' YRNA-derived fragment
ggcttttccgatggtagtg

SEQ ID NO: 27113 - DNA, 33 bp, Artificial Sequence
  synthetic circulating small noncoding RNA (sncRNA) 5' YRNA-derived fragment
agccagtcaaatttagcagtggagggttgtgta

SEQ ID NO: 27114 - DNA, 23 bp, Artificial Sequence
  synthetic circulating small noncoding RNA (sncRNA) 5' YRNA-derived fragment
aatggtagtggtttatcagaact

SEQ ID NO: 27115 - DNA, 25 bp, Artificial Sequence
  synthetic circulating small noncoding RNA (sncRNA) 5' YRNA-derived fragment
aaagccagtcaaggttagcagtggg

SEQ ID NO: 27116 - DNA, 28 bp, Artificial Sequence
  synthetic circulating small noncoding RNA (sncRNA) 5' YRNA-derived fragment
ggctggtcagatggtagtgggttatcag

SEQ ID NO: 27117 - DNA, 24 bp, Artificial Sequence
  synthetic circulating small noncoding RNA (sncRNA) 5' YRNA-derived fragment
ctagtcaagtgcagcagtgagaag

SEQ ID NO: 27118 - DNA, 37 bp, Artificial Sequence
  synthetic circulating small noncoding RNA (sncRNA) 5' YRNA-derived fragment
actctttccccccttctcactactgcacttgactagt

SEQ ID NO: 27119 - DNA, 30 bp, Artificial Sequence
  synthetic circulating small noncoding RNA (sncRNA) 5' YRNA-derived fragment
aataagttctgataacccactaccatcgga

SEQ ID NO: 27120 - DNA, 21 bp, Artificial Sequence
  synthetic circulating small noncoding RNA (sncRNA) 5' YRNA-derived fragment
ggttatcagaacttattaaca

SEQ ID NO: 27121 - DNA, 24 bp, Artificial Sequence
  synthetic circulating small noncoding RNA (sncRNA) 5' YRNA-derived fragment
aacaccactgcactcgaaccagcc

SEQ ID NO: 27122 - DNA, 46 bp, Artificial Sequence
  synthetic circulating small noncoding RNA (sncRNA) 5' YRNA-derived fragment
ctaaagttggtatacaaccccccactgctaaatttgactggctttt

SEQ ID NO: 27123 - DNA, 37 bp, Artificial Sequence
  synthetic circulating small noncoding RNA (sncRNA) 5' YRNA-derived fragment
gttccttctccactcccactgcttcacttgactagaa

SEQ ID NO: 27124 - DNA, 24 bp, Artificial Sequence
  synthetic circulating small noncoding RNA (sncRNA) 5' YRNA-derived fragment
atatggaagtgggttatcagaact

SEQ ID NO: 27125 - DNA, 19 bp, Artificial Sequence
  synthetic circulating small noncoding RNA (sncRNA) 5' YRNA-derived fragment
accttagtgacactaatat

SEQ ID NO: 27126 - DNA, 19 bp, Artificial Sequence
  synthetic circulating small noncoding RNA (sncRNA) 5' YRNA-derived fragment
cactaccattggacaagcc

SEQ ID NO: 27127 - DNA, 41 bp, Artificial Sequence
  synthetic circulating small noncoding RNA (sncRNA) 5' YRNA-derived fragment
ttctttgttccttctccactcccactgcttcacttgactag

SEQ ID NO: 27128 - DNA, 19 bp, Artificial Sequence
  synthetic circulating small noncoding RNA (sncRNA) 5' YRNA-derived fragment
actgctacatttgactggg

SEQ ID NO: 27129 - DNA, 29 bp, Artificial Sequence
  synthetic circulating small noncoding RNA (sncRNA) 5' YRNA-derived fragment
actagtcaagtgcagtagtgagaaggggg

SEQ ID NO: 27130 - DNA, 31 bp, Artificial Sequence
  synthetic circulating small noncoding RNA (sncRNA) 5' YRNA-derived fragment
acctgtaaacaccactgcacttggaccagcc

SEQ ID NO: 27131 - DNA, 32 bp, Artificial Sequence
  synthetic circulating small noncoding RNA (sncRNA) 5' YRNA-derived fragment
aataagttctgataacccactaccattggaca

SEQ ID NO: 27132 - DNA, 26 bp, Artificial Sequence
  synthetic circulating small noncoding RNA (sncRNA) 5' YRNA-derived fragment
agactactcaagtgcactagtgagaa

SEQ ID NO: 27133 - DNA, 29 bp, Artificial Sequence
  synthetic circulating small noncoding RNA (sncRNA) 5' YRNA-derived fragment
ggtccaatggtagtgggttatcagaactt

SEQ ID NO: 27134 - DNA, 39 bp, Artificial Sequence
  synthetic circulating small noncoding RNA (sncRNA) 5' YRNA-derived fragment
agccattcaaatttagcagtggggggttgtatacgaact

SEQ ID NO: 27135 - DNA, 34 bp, Artificial Sequence
  synthetic circulating small noncoding RNA (sncRNA) 5' YRNA-derived fragment
tatataaccccccattgctaaattggactggatt

SEQ ID NO: 27136 - DNA, 23 bp, Artificial Sequence
  synthetic circulating small noncoding RNA (sncRNA) 5' YRNA-derived fragment
agttctgataacctactaccatc

SEQ ID NO: 27137 - DNA, 28 bp, Artificial Sequence
  synthetic circulating small noncoding RNA (sncRNA) 5' YRNA-derived fragment
ctggtccgaaggtagtgaattatctcaa

SEQ ID NO: 27138 - DNA, 19 bp, Artificial Sequence
  synthetic circulating small noncoding RNA (sncRNA) 5' YRNA-derived fragment
gacagtcaaatttagcagt

SEQ ID NO: 27139 - DNA, 22 bp, Artificial Sequence
  synthetic circulating small noncoding RNA (sncRNA) 5' YRNA-derived fragment
cgcccactgcttcacttgacta

SEQ ID NO: 27140 - DNA, 26 bp, Artificial Sequence
  synthetic circulating small noncoding RNA (sncRNA) 5' YRNA-derived fragment
aaggatagtcaagtgaagcagtggga

SEQ ID NO: 27141 - DNA, 31 bp, Artificial Sequence
  synthetic circulating small noncoding RNA (sncRNA) 5' YRNA-derived fragment
taataagttctgataacccactaccatcgga

SEQ ID NO: 27142 - DNA, 23 bp, Artificial Sequence
  synthetic circulating small noncoding RNA (sncRNA) 5' YRNA-derived fragment
tcccactgcttcacttggctagt

SEQ ID NO: 27143 - DNA, 21 bp, Artificial Sequence
  synthetic circulating small noncoding RNA (sncRNA) 5' YRNA-derived fragment
tcccactgcttcacttgactt

SEQ ID NO: 27144 - DNA, 36 bp, Artificial Sequence
  synthetic circulating small noncoding RNA (sncRNA) 5' YRNA-derived fragment
actagtcaagtgcagtagtgagaaggggggaaagag

SEQ ID NO: 27145 - DNA, 31 bp, Artificial Sequence
  synthetic circulating small noncoding RNA (sncRNA) 5' YRNA-derived fragment
ccccccttctcactactgcacttaactagtc

SEQ ID NO: 27146 - DNA, 20 bp, Artificial Sequence
  synthetic circulating small noncoding RNA (sncRNA) 5' YRNA-derived fragment
cattgcactcggatcagcct

SEQ ID NO: 27147 - DNA, 31 bp, Artificial Sequence
  synthetic circulating small noncoding RNA (sncRNA) 5' YRNA-derived fragment
gttggtctgatggtagtgggttaccagaact

SEQ ID NO: 27148 - DNA, 23 bp, Artificial Sequence
  synthetic circulating small noncoding RNA (sncRNA) 5' YRNA-derived fragment
gttcgatctgtaactgactgtga

SEQ ID NO: 27149 - DNA, 32 bp, Artificial Sequence
  synthetic circulating small noncoding RNA (sncRNA) 5' YRNA-derived fragment
aagttctgataacccactaccatcgaaccagc

SEQ ID NO: 27150 - DNA, 22 bp, Artificial Sequence
  synthetic circulating small noncoding RNA (sncRNA) 5' YRNA-derived fragment
cttctcactactacacttgact

SEQ ID NO: 27151 - DNA, 22 bp, Artificial Sequence
  synthetic circulating small noncoding RNA (sncRNA) 5' YRNA-derived fragment
gttctgataactcattaccatc

SEQ ID NO: 27152 - DNA, 20 bp, Artificial Sequence
  synthetic circulating small noncoding RNA (sncRNA) 5' YRNA-derived fragment
gctagtcaagtgaagcagtg

SEQ ID NO: 27153 - DNA, 30 bp, Artificial Sequence
  synthetic circulating small noncoding RNA (sncRNA) 5' YRNA-derived fragment
aaagccagtcaaatttagcagtggggggct

SEQ ID NO: 27154 - DNA, 37 bp, Artificial Sequence
  synthetic circulating small noncoding RNA (sncRNA) 5' YRNA-derived fragment
gttggtatacaaccccccactgctaaatttgactggc

SEQ ID NO: 27155 - DNA, 19 bp, Artificial Sequence
  synthetic circulating small noncoding RNA (sncRNA) 5' YRNA-derived fragment
tcctaaatttgcctggctt

SEQ ID NO: 27156 - DNA, 30 bp, Artificial Sequence
  synthetic circulating small noncoding RNA (sncRNA) 5' YRNA-derived fragment
aagctagtcaaatttagcagtggggggtta

SEQ ID NO: 27157 - DNA, 27 bp, Artificial Sequence
  synthetic circulating small noncoding RNA (sncRNA) 5' YRNA-derived fragment
aagccactaaaatttagccgtgggggt

SEQ ID NO: 27158 - DNA, 32 bp, Artificial Sequence
  synthetic circulating small noncoding RNA (sncRNA) 5' YRNA-derived fragment
ggctggtctgaaggtggtgagttatttcaagt

SEQ ID NO: 27159 - DNA, 26 bp, Artificial Sequence
  synthetic circulating small noncoding RNA (sncRNA) 5' YRNA-derived fragment
caaccccccactgctaaatttgactg

SEQ ID NO: 27160 - DNA, 36 bp, Artificial Sequence
  synthetic circulating small noncoding RNA (sncRNA) 5' YRNA-derived fragment
ttccttctccattcccactgcttcacttgactagtt

SEQ ID NO: 27161 - DNA, 18 bp, Artificial Sequence
  synthetic circulating small noncoding RNA (sncRNA) 5' YRNA-derived fragment
gccagtcaaatttagcgg

SEQ ID NO: 27162 - DNA, 27 bp, Artificial Sequence
  synthetic circulating small noncoding RNA (sncRNA) 5' YRNA-derived fragment
ctcccactgcttcacttgactggcctt

SEQ ID NO: 27163 - DNA, 28 bp, Artificial Sequence
  synthetic circulating small noncoding RNA (sncRNA) 5' YRNA-derived fragment
taggatagtcaagtgaagcagtgggagt

SEQ ID NO: 27164 - DNA, 42 bp, Artificial Sequence
  synthetic circulating small noncoding RNA (sncRNA) 5' YRNA-derived fragment
aggctagtcaagtgaagctgtgggagtggagaaggaacaaag

SEQ ID NO: 27165 - DNA, 38 bp, Artificial Sequence
  synthetic circulating small noncoding RNA (sncRNA) 5' YRNA-derived fragment
aaggctagtcaagtgaagcagtgggagtggaaaaagaa

SEQ ID NO: 27166 - DNA, 22 bp, Artificial Sequence
  synthetic circulating small noncoding RNA (sncRNA) 5' YRNA-derived fragment
tcccactgcttcacttggctag

SEQ ID NO: 27167 - DNA, 31 bp, Artificial Sequence
  synthetic circulating small noncoding RNA (sncRNA) 5' YRNA-derived fragment
ggctggtcagagtgcagtggtgtttacaact

SEQ ID NO: 27168 - DNA, 25 bp, Artificial Sequence
  synthetic circulating small noncoding RNA (sncRNA) 5' YRNA-derived fragment
tcagtcaaatttagcagtggggggt

SEQ ID NO: 27169 - DNA, 33 bp, Artificial Sequence
  synthetic circulating small noncoding RNA (sncRNA) 5' YRNA-derived fragment
taagccagtcaaatttagcagttgggggttgta

SEQ ID NO: 27170 - DNA, 27 bp, Artificial Sequence
  synthetic circulating small noncoding RNA (sncRNA) 5' YRNA-derived fragment
agttctgataacctactaccatcggac

SEQ ID NO: 27171 - DNA, 38 bp, Artificial Sequence
  synthetic circulating small noncoding RNA (sncRNA) 5' YRNA-derived fragment
cagccagtcaaatttagcagtggggggttgtataccaa

SEQ ID NO: 27172 - DNA, 23 bp, Artificial Sequence
  synthetic circulating small noncoding RNA (sncRNA) 5' YRNA-derived fragment
gatggtagtgggttatctgaact

SEQ ID NO: 27173 - DNA, 32 bp, Artificial Sequence
  synthetic circulating small noncoding RNA (sncRNA) 5' YRNA-derived fragment
gactagtcaagtgaagcagtgggagtggagaa

SEQ ID NO: 27174 - DNA, 26 bp, Artificial Sequence
  synthetic circulating small noncoding RNA (sncRNA) 5' YRNA-derived fragment
agccagtcaaatttagcagtgaagga

SEQ ID NO: 27175 - DNA, 24 bp, Artificial Sequence
  synthetic circulating small noncoding RNA (sncRNA) 5' YRNA-derived fragment
agccattcaaatttagcagtgggg

SEQ ID NO: 27176 - DNA, 34 bp, Artificial Sequence
  synthetic circulating small noncoding RNA (sncRNA) 5' YRNA-derived fragment
gactggtccgaaggtagtgagttatctcagttga

SEQ ID NO: 27177 - DNA, 44 bp, Artificial Sequence
  synthetic circulating small noncoding RNA (sncRNA) 5' YRNA-derived fragment
gatttctttgttccttttccactcccactgcttcacttgactag

SEQ ID NO: 27178 - DNA, 19 bp, Artificial Sequence
  synthetic circulating small noncoding RNA (sncRNA) 5' YRNA-derived fragment
ccccactgctaaatttgac

SEQ ID NO: 27179 - DNA, 30 bp, Artificial Sequence
  synthetic circulating small noncoding RNA (sncRNA) 5' YRNA-derived fragment
acccccccactgctaaatttgactggcttt

SEQ ID NO: 27180 - DNA, 39 bp, Artificial Sequence
  synthetic circulating small noncoding RNA (sncRNA) 5' YRNA-derived fragment
aggaacaaagaaatctgtaactggttgtgagcaattcgt

SEQ ID NO: 27181 - DNA, 19 bp, Artificial Sequence
  synthetic circulating small noncoding RNA (sncRNA) 5' YRNA-derived fragment
tgttttgataacccactac

SEQ ID NO: 27182 - DNA, 29 bp, Artificial Sequence
  synthetic circulating small noncoding RNA (sncRNA) 5' YRNA-derived fragment
aagttctgataacccaacaccattggacc

SEQ ID NO: 27183 - DNA, 30 bp, Artificial Sequence
  synthetic circulating small noncoding RNA (sncRNA) 5' YRNA-derived fragment
tcccccactgctaaatttgactggcttaaa

SEQ ID NO: 27184 - DNA, 45 bp, Artificial Sequence
  synthetic circulating small noncoding RNA (sncRNA) 5' YRNA-derived fragment
cagaacttattaacattagtgtcactaaagttggtatacaacccc

SEQ ID NO: 27185 - DNA, 33 bp, Artificial Sequence
  synthetic circulating small noncoding RNA (sncRNA) 5' YRNA-derived fragment
aagccagtaaaatttagcagtggggagttgtat

SEQ ID NO: 27186 - DNA, 18 bp, Artificial Sequence
  synthetic circulating small noncoding RNA (sncRNA) 5' YRNA-derived fragment
agttctgataacacactg

SEQ ID NO: 27187 - DNA, 19 bp, Artificial Sequence
  synthetic circulating small noncoding RNA (sncRNA) 5' YRNA-derived fragment
agccagtcaaatttagcgg

SEQ ID NO: 27188 - DNA, 21 bp, Artificial Sequence
  synthetic circulating small noncoding RNA (sncRNA) 5' YRNA-derived fragment
tccttgttctactctttcccc

SEQ ID NO: 27189 - DNA, 22 bp, Artificial Sequence
  synthetic circulating small noncoding RNA (sncRNA) 5' YRNA-derived fragment
ctaatcaagttaagcagtggga

SEQ ID NO: 27190 - DNA, 30 bp, Artificial Sequence
  synthetic circulating small noncoding RNA (sncRNA) 5' YRNA-derived fragment
taatttctgataacccactaccatcggacc

SEQ ID NO: 27191 - DNA, 30 bp, Artificial Sequence
  synthetic circulating small noncoding RNA (sncRNA) 5' YRNA-derived fragment
attgagataacccactaccttcggacgagc

SEQ ID NO: 27192 - DNA, 18 bp, Artificial Sequence
  synthetic circulating small noncoding RNA (sncRNA) 5' YRNA-derived fragment
agttctgagaacccaata

SEQ ID NO: 27193 - DNA, 44 bp, Artificial Sequence
  synthetic circulating small noncoding RNA (sncRNA) 5' YRNA-derived fragment
taaagttggtatacaaccccccattgctaaatttgactggcttt

SEQ ID NO: 27194 - DNA, 25 bp, Artificial Sequence
  synthetic circulating small noncoding RNA (sncRNA) 5' YRNA-derived fragment
agttctgataacccactatcattgg

SEQ ID NO: 27195 - DNA, 31 bp, Artificial Sequence
  synthetic circulating small noncoding RNA (sncRNA) 5' YRNA-derived fragment
ggctggtccaagtgcagtggtgtttacaact

SEQ ID NO: 27196 - DNA, 18 bp, Artificial Sequence
  synthetic circulating small noncoding RNA (sncRNA) 5' YRNA-derived fragment
aagtgcagtagtgagaag

SEQ ID NO: 27197 - DNA, 29 bp, Artificial Sequence
  synthetic circulating small noncoding RNA (sncRNA) 5' YRNA-derived fragment
agccattcaaatttagcagtggggggttg

SEQ ID NO: 27198 - DNA, 18 bp, Artificial Sequence
  synthetic circulating small noncoding RNA (sncRNA) 5' YRNA-derived fragment
aagctagtcaaatttagc

SEQ ID NO: 27199 - DNA, 27 bp, Artificial Sequence
  synthetic circulating small noncoding RNA (sncRNA) 5' YRNA-derived fragment
cccactgcttcacttgactagcctaat

SEQ ID NO: 27200 - DNA, 32 bp, Artificial Sequence
  synthetic circulating small noncoding RNA (sncRNA) 5' YRNA-derived fragment
tctccactcccgctgcttcacttgactagcct

SEQ ID NO: 27201 - DNA, 26 bp, Artificial Sequence
  synthetic circulating small noncoding RNA (sncRNA) 5' YRNA-derived fragment
ctcccactgcttcacttgactagcca

SEQ ID NO: 27202 - DNA, 24 bp, Artificial Sequence
  synthetic circulating small noncoding RNA (sncRNA) 5' YRNA-derived fragment
ctagtcatgtgcagtagtgagaag

SEQ ID NO: 27203 - DNA, 25 bp, Artificial Sequence
  synthetic circulating small noncoding RNA (sncRNA) 5' YRNA-derived fragment
aagactaggcaagtgaagcagtggg

SEQ ID NO: 27204 - DNA, 22 bp, Artificial Sequence
  synthetic circulating small noncoding RNA (sncRNA) 5' YRNA-derived fragment
accccccactgctaaatttgac

SEQ ID NO: 27205 - DNA, 20 bp, Artificial Sequence
  synthetic circulating small noncoding RNA (sncRNA) 5' YRNA-derived fragment
accgcgcttgactagcttgc

SEQ ID NO: 27206 - DNA, 23 bp, Artificial Sequence
  synthetic circulating small noncoding RNA (sncRNA) 5' YRNA-derived fragment
ttagtgtcactaaagttggtata

SEQ ID NO: 27207 - DNA, 25 bp, Artificial Sequence
  synthetic circulating small noncoding RNA (sncRNA) 5' YRNA-derived fragment
aaacaccactgcactcagaccagcc

SEQ ID NO: 27208 - DNA, 27 bp, Artificial Sequence
  synthetic circulating small noncoding RNA (sncRNA) 5' YRNA-derived fragment
cggctggtccgatggtagtgggttatc

SEQ ID NO: 27209 - DNA, 39 bp, Artificial Sequence
  synthetic circulating small noncoding RNA (sncRNA) 5' YRNA-derived fragment
aacaatcaattgagataactcactacctttggacaagcc

SEQ ID NO: 27210 - DNA, 23 bp, Artificial Sequence
  synthetic circulating small noncoding RNA (sncRNA) 5' YRNA-derived fragment
ctagttaagtgcagtagtgagaa

SEQ ID NO: 27211 - DNA, 29 bp, Artificial Sequence
  synthetic circulating small noncoding RNA (sncRNA) 5' YRNA-derived fragment
ttctgataacccactaccatcggaccagt

SEQ ID NO: 27212 - DNA, 24 bp, Artificial Sequence
  synthetic circulating small noncoding RNA (sncRNA) 5' YRNA-derived fragment
actcccactgcttcacctgactag

SEQ ID NO: 27213 - DNA, 25 bp, Artificial Sequence
  synthetic circulating small noncoding RNA (sncRNA) 5' YRNA-derived fragment
agactagtcaagtgcagtagtgaga

SEQ ID NO: 27214 - DNA, 27 bp, Artificial Sequence
  synthetic circulating small noncoding RNA (sncRNA) 5' YRNA-derived fragment
agcagtggggggttgtataccaacttt

SEQ ID NO: 27215 - DNA, 24 bp, Artificial Sequence
  synthetic circulating small noncoding RNA (sncRNA) 5' YRNA-derived fragment
ggctggtccaatggtagtggttta

SEQ ID NO: 27216 - DNA, 21 bp, Artificial Sequence
  synthetic circulating small noncoding RNA (sncRNA) 5' YRNA-derived fragment
tagccagtcagattttagcag

SEQ ID NO: 27217 - DNA, 26 bp, Artificial Sequence
  synthetic circulating small noncoding RNA (sncRNA) 5' YRNA-derived fragment
aaagccagtctaattagcagcggggg

SEQ ID NO: 27218 - DNA, 23 bp, Artificial Sequence
  synthetic circulating small noncoding RNA (sncRNA) 5' YRNA-derived fragment
ctagtcaagtgtattagtgagaa

SEQ ID NO: 27219 - DNA, 31 bp, Artificial Sequence
  synthetic circulating small noncoding RNA (sncRNA) 5' YRNA-derived fragment
ggctggtcccagtgcagtggtgtttataact

SEQ ID NO: 27220 - DNA, 36 bp, Artificial Sequence
  synthetic circulating small noncoding RNA (sncRNA) 5' YRNA-derived fragment
ggccggtctgaaggtagtgagttatctcaattgatt

SEQ ID NO: 27221 - DNA, 26 bp, Artificial Sequence
  synthetic circulating small noncoding RNA (sncRNA) 5' YRNA-derived fragment
ctcccactgcttcacctcactagcct

SEQ ID NO: 27222 - DNA, 22 bp, Artificial Sequence
  synthetic circulating small noncoding RNA (sncRNA) 5' YRNA-derived fragment
tagtcaagtgcaggagtgagaa

SEQ ID NO: 27223 - DNA, 36 bp, Artificial Sequence
  synthetic circulating small noncoding RNA (sncRNA) 5' YRNA-derived fragment
gtttggtccaatggtagtgggttatcagaacttatt

SEQ ID NO: 27224 - DNA, 30 bp, Artificial Sequence
  synthetic circulating small noncoding RNA (sncRNA) 5' YRNA-derived fragment
aattgagataactcactaccttcagacctg

SEQ ID NO: 27225 - DNA, 24 bp, Artificial Sequence
  synthetic circulating small noncoding RNA (sncRNA) 5' YRNA-derived fragment
aaccagtcaaatttagcagtgggg

SEQ ID NO: 27226 - DNA, 34 bp, Artificial Sequence
  synthetic circulating small noncoding RNA (sncRNA) 5' YRNA-derived fragment
aaggatagtcaagtgaagcagtgggagtggagaa

SEQ ID NO: 27227 - DNA, 35 bp, Artificial Sequence
  synthetic circulating small noncoding RNA (sncRNA) 5' YRNA-derived fragment
ggtccgatggtagtgggttatcagaacttactaat

SEQ ID NO: 27228 - DNA, 31 bp, Artificial Sequence
  synthetic circulating small noncoding RNA (sncRNA) 5' YRNA-derived fragment
ctccgctcccactgctttacttgactagcct

SEQ ID NO: 27229 - DNA, 29 bp, Artificial Sequence
  synthetic circulating small noncoding RNA (sncRNA) 5' YRNA-derived fragment
ctagtcaagtgcagtagtgagaagtgggg

SEQ ID NO: 27230 - DNA, 31 bp, Artificial Sequence
  synthetic circulating small noncoding RNA (sncRNA) 5' YRNA-derived fragment
attgagataactcactacctttggaccagct

SEQ ID NO: 27231 - DNA, 29 bp, Artificial Sequence
  synthetic circulating small noncoding RNA (sncRNA) 5' YRNA-derived fragment
cttctcactactacacttgactagtcttg

SEQ ID NO: 27232 - DNA, 22 bp, Artificial Sequence
  synthetic circulating small noncoding RNA (sncRNA) 5' YRNA-derived fragment
tcccattgcttcacttgactag

SEQ ID NO: 27233 - DNA, 38 bp, Artificial Sequence
  synthetic circulating small noncoding RNA (sncRNA) 5' YRNA-derived fragment
gtagtgggttatcagaacttattaacattagtgtcact

SEQ ID NO: 27234 - DNA, 36 bp, Artificial Sequence
  synthetic circulating small noncoding RNA (sncRNA) 5' YRNA-derived fragment
gcttttccgatggtagtgggttatctgaacttatta

SEQ ID NO: 27235 - DNA, 34 bp, Artificial Sequence
  synthetic circulating small noncoding RNA (sncRNA) 5' YRNA-derived fragment
ttctccactcccactgcttcgcttgactagcctt

SEQ ID NO: 27236 - DNA, 30 bp, Artificial Sequence
  synthetic circulating small noncoding RNA (sncRNA) 5' YRNA-derived fragment
ctcccactgcttcacttgactagccttctt

SEQ ID NO: 27237 - DNA, 23 bp, Artificial Sequence
  synthetic circulating small noncoding RNA (sncRNA) 5' YRNA-derived fragment
aaaccagtcaaatttagcagtgg

SEQ ID NO: 27238 - DNA, 30 bp, Artificial Sequence
  synthetic circulating small noncoding RNA (sncRNA) 5' YRNA-derived fragment
ggctggtctgagtgcagtggtgtttacaat

SEQ ID NO: 27239 - DNA, 29 bp, Artificial Sequence
  synthetic circulating small noncoding RNA (sncRNA) 5' YRNA-derived fragment
ttgagataactcgctaccttaggaccagc

SEQ ID NO: 27240 - DNA, 31 bp, Artificial Sequence
  synthetic circulating small noncoding RNA (sncRNA) 5' YRNA-derived fragment
aggatagtcaagtgaagcagtgggagtggag

SEQ ID NO: 27241 - DNA, 30 bp, Artificial Sequence
  synthetic circulating small noncoding RNA (sncRNA) 5' YRNA-derived fragment
tttccgatggtagtgggttatctgaactta

SEQ ID NO: 27242 - DNA, 19 bp, Artificial Sequence
  synthetic circulating small noncoding RNA (sncRNA) 5' YRNA-derived fragment
cattagtgtcactaaaatt

SEQ ID NO: 27243 - DNA, 37 bp, Artificial Sequence
  synthetic circulating small noncoding RNA (sncRNA) 5' YRNA-derived fragment
gctagtcaagtgaagcagttggagtggagaaggaaca

SEQ ID NO: 27244 - DNA, 40 bp, Artificial Sequence
  synthetic circulating small noncoding RNA (sncRNA) 5' YRNA-derived fragment
aactattaagttctgataacccactaccattggaccagcc

SEQ ID NO: 27245 - DNA, 27 bp, Artificial Sequence
  synthetic circulating small noncoding RNA (sncRNA) 5' YRNA-derived fragment
attcccactgcttcactagactagcct

SEQ ID NO: 27246 - DNA, 22 bp, Artificial Sequence
  synthetic circulating small noncoding RNA (sncRNA) 5' YRNA-derived fragment
actgtgaacaatcaattgagat

SEQ ID NO: 27247 - DNA, 18 bp, Artificial Sequence
  synthetic circulating small noncoding RNA (sncRNA) 5' YRNA-derived fragment
cattagtgtcactaaaat

SEQ ID NO: 27248 - DNA, 43 bp, Artificial Sequence
  synthetic circulating small noncoding RNA (sncRNA) 5' YRNA-derived fragment
taatattaataagttctgataacccactaccatcagaccagcc

SEQ ID NO: 27249 - DNA, 28 bp, Artificial Sequence
  synthetic circulating small noncoding RNA (sncRNA) 5' YRNA-derived fragment
aaagactagtcaagtgcagtagtgagaa

SEQ ID NO: 27250 - DNA, 25 bp, Artificial Sequence
  synthetic circulating small noncoding RNA (sncRNA) 5' YRNA-derived fragment
gctggtccaaagggagtgagttatc

SEQ ID NO: 27251 - DNA, 24 bp, Artificial Sequence
  synthetic circulating small noncoding RNA (sncRNA) 5' YRNA-derived fragment
gataacccactaccatcggaccag

SEQ ID NO: 27252 - DNA, 35 bp, Artificial Sequence
  synthetic circulating small noncoding RNA (sncRNA) 5' YRNA-derived fragment
ttaaaccagtcaaatttagcagtggggggttgtat

SEQ ID NO: 27253 - DNA, 19 bp, Artificial Sequence
  synthetic circulating small noncoding RNA (sncRNA) 5' YRNA-derived fragment
cagtgggagtggagaagga

SEQ ID NO: 27254 - DNA, 30 bp, Artificial Sequence
  synthetic circulating small noncoding RNA (sncRNA) 5' YRNA-derived fragment
gctggtctgaaggtagtgagttagctcaat

SEQ ID NO: 27255 - DNA, 26 bp, Artificial Sequence
  synthetic circulating small noncoding RNA (sncRNA) 5' YRNA-derived fragment
ctactcccactgcttcacttgactag

SEQ ID NO: 27256 - DNA, 23 bp, Artificial Sequence
  synthetic circulating small noncoding RNA (sncRNA) 5' YRNA-derived fragment
cactgcttcacttgactaacctt

SEQ ID NO: 27257 - DNA, 27 bp, Artificial Sequence
  synthetic circulating small noncoding RNA (sncRNA) 5' YRNA-derived fragment
cttcccactgctaaatttaactggcaa

SEQ ID NO: 27258 - DNA, 31 bp, Artificial Sequence
  synthetic circulating small noncoding RNA (sncRNA) 5' YRNA-derived fragment
acaacccccaactgctaaatttgactggctt

SEQ ID NO: 27259 - DNA, 29 bp, Artificial Sequence
  synthetic circulating small noncoding RNA (sncRNA) 5' YRNA-derived fragment
cagccagtcaaatttagcagtggggggtt

SEQ ID NO: 27260 - DNA, 25 bp, Artificial Sequence
  synthetic circulating small noncoding RNA (sncRNA) 5' YRNA-derived fragment
ccccgctgctaaatttggctggctt

SEQ ID NO: 27261 - DNA, 30 bp, Artificial Sequence
  synthetic circulating small noncoding RNA (sncRNA) 5' YRNA-derived fragment
ctggtccgatggtagtgggttaccagaact

SEQ ID NO: 27262 - DNA, 32 bp, Artificial Sequence
  synthetic circulating small noncoding RNA (sncRNA) 5' YRNA-derived fragment
ggctggtctgaaggcagtgagttatctcactt

SEQ ID NO: 27263 - DNA, 32 bp, Artificial Sequence
  synthetic circulating small noncoding RNA (sncRNA) 5' YRNA-derived fragment
ggctggtccaaaggtagtgagttatctcagtt

SEQ ID NO: 27264 - DNA, 35 bp, Artificial Sequence
  synthetic circulating small noncoding RNA (sncRNA) 5' YRNA-derived fragment
aggctagtcaagtgaagcagtgggagtggggaagg

SEQ ID NO: 27265 - DNA, 19 bp, Artificial Sequence
  synthetic circulating small noncoding RNA (sncRNA) 5' YRNA-derived fragment
aagctctgacaacccacta

SEQ ID NO: 27266 - DNA, 29 bp, Artificial Sequence
  synthetic circulating small noncoding RNA (sncRNA) 5' YRNA-derived fragment
tctccactcccactgcttcacttgactag

SEQ ID NO: 27267 - DNA, 29 bp, Artificial Sequence
  synthetic circulating small noncoding RNA (sncRNA) 5' YRNA-derived fragment
ccccttctcactactgcacttgactagtc

SEQ ID NO: 27268 - DNA, 23 bp, Artificial Sequence
  synthetic circulating small noncoding RNA (sncRNA) 5' YRNA-derived fragment
agactactcaagtgcagtagtga

SEQ ID NO: 27269 - DNA, 37 bp, Artificial Sequence
  synthetic circulating small noncoding RNA (sncRNA) 5' YRNA-derived fragment
tgttccttctccactcccactgcttcacttgactagc

SEQ ID NO: 27270 - DNA, 18 bp, Artificial Sequence
  synthetic circulating small noncoding RNA (sncRNA) 5' YRNA-derived fragment
gtccgagtgttgtgggtt

SEQ ID NO: 27271 - DNA, 30 bp, Artificial Sequence
  synthetic circulating small noncoding RNA (sncRNA) 5' YRNA-derived fragment
gttggtctgatggtagtgggttaccagaac

SEQ ID NO: 27272 - DNA, 33 bp, Artificial Sequence
  synthetic circulating small noncoding RNA (sncRNA) 5' YRNA-derived fragment
agttctgataacccactactatcggaccagcca

SEQ ID NO: 27273 - DNA, 28 bp, Artificial Sequence
  synthetic circulating small noncoding RNA (sncRNA) 5' YRNA-derived fragment
aagactattcaagtgcagtagtgagaag

SEQ ID NO: 27274 - DNA, 24 bp, Artificial Sequence
  synthetic circulating small noncoding RNA (sncRNA) 5' YRNA-derived fragment
gttctgataacccactactatcgg

SEQ ID NO: 27275 - DNA, 24 bp, Artificial Sequence
  synthetic circulating small noncoding RNA (sncRNA) 5' YRNA-derived fragment
acctcccactgctaaatttgactg

SEQ ID NO: 27276 - DNA, 19 bp, Artificial Sequence
  synthetic circulating small noncoding RNA (sncRNA) 5' YRNA-derived fragment
actgctatatttgactggt

SEQ ID NO: 27277 - DNA, 32 bp, Artificial Sequence
  synthetic circulating small noncoding RNA (sncRNA) 5' YRNA-derived fragment
tctgtaactgactgtgaacaatcaattaagat

SEQ ID NO: 27278 - DNA, 40 bp, Artificial Sequence
  synthetic circulating small noncoding RNA (sncRNA) 5' YRNA-derived fragment
aagccagtcaaatttagcagtggggtgttgtataccaact

SEQ ID NO: 27279 - DNA, 32 bp, Artificial Sequence
  synthetic circulating small noncoding RNA (sncRNA) 5' YRNA-derived fragment
tacaaccccccattgctaaatttgactggctt

SEQ ID NO: 27280 - DNA, 30 bp, Artificial Sequence
  synthetic circulating small noncoding RNA (sncRNA) 5' YRNA-derived fragment
ctagtcaagtgacgcagtgggagtggagaa

SEQ ID NO: 27281 - DNA, 26 bp, Artificial Sequence
  synthetic circulating small noncoding RNA (sncRNA) 5' YRNA-derived fragment
agttctgataacacactgccatgggc

SEQ ID NO: 27282 - DNA, 27 bp, Artificial Sequence
  synthetic circulating small noncoding RNA (sncRNA) 5' YRNA-derived fragment
tgactagtcaagtgcagtagtgagaag

SEQ ID NO: 27283 - DNA, 25 bp, Artificial Sequence
  synthetic circulating small noncoding RNA (sncRNA) 5' YRNA-derived fragment
tcccactgctttacttgactagcct

SEQ ID NO: 27284 - DNA, 19 bp, Artificial Sequence
  synthetic circulating small noncoding RNA (sncRNA) 5' YRNA-derived fragment
gataacccactaccatcgg

SEQ ID NO: 27285 - DNA, 27 bp, Artificial Sequence
  synthetic circulating small noncoding RNA (sncRNA) 5' YRNA-derived fragment
aagctagtcaagcgtggttgtgggggg

SEQ ID NO: 27286 - DNA, 19 bp, Artificial Sequence
  synthetic circulating small noncoding RNA (sncRNA) 5' YRNA-derived fragment
ccactgctaaatttgacta

SEQ ID NO: 27287 - DNA, 23 bp, Artificial Sequence
  synthetic circulating small noncoding RNA (sncRNA) 5' YRNA-derived fragment
atggtagtgggttatcagaactt

SEQ ID NO: 27288 - DNA, 26 bp, Artificial Sequence
  synthetic circulating small noncoding RNA (sncRNA) 5' YRNA-derived fragment
agatggtccgaaggtagtgagttatc

SEQ ID NO: 27289 - DNA, 27 bp, Artificial Sequence
  synthetic circulating small noncoding RNA (sncRNA) 5' YRNA-derived fragment
ggctgctccaatggtagtgggttatca

SEQ ID NO: 27290 - DNA, 19 bp, Artificial Sequence
  synthetic circulating small noncoding RNA (sncRNA) 5' YRNA-derived fragment
cactacctttggacaagcc

SEQ ID NO: 27291 - DNA, 30 bp, Artificial Sequence
  synthetic circulating small noncoding RNA (sncRNA) 5' YRNA-derived fragment
gttctgataacccactaccattggaccaac

SEQ ID NO: 27292 - DNA, 27 bp, Artificial Sequence
  synthetic circulating small noncoding RNA (sncRNA) 5' YRNA-derived fragment
gtccaatgatagtgggttatcagaact

SEQ ID NO: 27293 - DNA, 26 bp, Artificial Sequence
  synthetic circulating small noncoding RNA (sncRNA) 5' YRNA-derived fragment
ccccccacgctaagtttgactggctt

SEQ ID NO: 27294 - DNA, 26 bp, Artificial Sequence
  synthetic circulating small noncoding RNA (sncRNA) 5' YRNA-derived fragment
cccactgcttcacttgactaaccttt

SEQ ID NO: 27295 - DNA, 22 bp, Artificial Sequence
  synthetic circulating small noncoding RNA (sncRNA) 5' YRNA-derived fragment
cagtcaaatttagcagttgggg

SEQ ID NO: 27296 - DNA, 31 bp, Artificial Sequence
  synthetic circulating small noncoding RNA (sncRNA) 5' YRNA-derived fragment
taaaaaaccagtcaaatttagcagtaggggg

SEQ ID NO: 27297 - DNA, 18 bp, Artificial Sequence
  synthetic circulating small noncoding RNA (sncRNA) 5' YRNA-derived fragment
gctagtcaagtgaagcag

SEQ ID NO: 27298 - DNA, 23 bp, Artificial Sequence
  synthetic circulating small noncoding RNA (sncRNA) 5' YRNA-derived fragment
gatagtcaagtgaagcagtggga

SEQ ID NO: 27299 - DNA, 46 bp, Artificial Sequence
  synthetic circulating small noncoding RNA (sncRNA) 5' YRNA-derived fragment
ggctggtccgagtgcagtggtgtttacaactaattgatcacaacca

SEQ ID NO: 27300 - DNA, 22 bp, Artificial Sequence
  synthetic circulating small noncoding RNA (sncRNA) 5' YRNA-derived fragment
ctagtcaagcgtggttgtgggg

SEQ ID NO: 27301 - DNA, 24 bp, Artificial Sequence
  synthetic circulating small noncoding RNA (sncRNA) 5' YRNA-derived fragment
gatggtagtgggttatcagagctt

SEQ ID NO: 27302 - DNA, 23 bp, Artificial Sequence
  synthetic circulating small noncoding RNA (sncRNA) 5' YRNA-derived fragment
gaagtgggttatcagaacttatt

SEQ ID NO: 27303 - DNA, 32 bp, Artificial Sequence
  synthetic circulating small noncoding RNA (sncRNA) 5' YRNA-derived fragment
ggctggcctgatggtagtgagttatctcaact

SEQ ID NO: 27304 - DNA, 28 bp, Artificial Sequence
  synthetic circulating small noncoding RNA (sncRNA) 5' YRNA-derived fragment
tcaagccagtcaaatttagcagtggggt

SEQ ID NO: 27305 - DNA, 30 bp, Artificial Sequence
  synthetic circulating small noncoding RNA (sncRNA) 5' YRNA-derived fragment
ttctgataacccactatcattggaccaacc

SEQ ID NO: 27306 - DNA, 23 bp, Artificial Sequence
  synthetic circulating small noncoding RNA (sncRNA) 5' YRNA-derived fragment
aaaccagtcaaatttagcagtag

SEQ ID NO: 27307 - DNA, 27 bp, Artificial Sequence
  synthetic circulating small noncoding RNA (sncRNA) 5' YRNA-derived fragment
cttccactgcttcacttgactagcctt

SEQ ID NO: 27308 - DNA, 40 bp, Artificial Sequence
  synthetic circulating small noncoding RNA (sncRNA) 5' YRNA-derived fragment
aaaccagtcaaatttagcagtggggggttgtataccaact

SEQ ID NO: 27309 - DNA, 29 bp, Artificial Sequence
  synthetic circulating small noncoding RNA (sncRNA) 5' YRNA-derived fragment
ctgggccgaaggtagtgagttatctcgat

SEQ ID NO: 27310 - DNA, 32 bp, Artificial Sequence
  synthetic circulating small noncoding RNA (sncRNA) 5' YRNA-derived fragment
ggctggtctgaaggtagtgagttatctcagtt

SEQ ID NO: 27311 - DNA, 26 bp, Artificial Sequence
  synthetic circulating small noncoding RNA (sncRNA) 5' YRNA-derived fragment
aagccagtcaaatttagcagtggtag

SEQ ID NO: 27312 - DNA, 28 bp, Artificial Sequence
  synthetic circulating small noncoding RNA (sncRNA) 5' YRNA-derived fragment
ctttctcactactgcacttgactagtct

SEQ ID NO: 27313 - DNA, 27 bp, Artificial Sequence
  synthetic circulating small noncoding RNA (sncRNA) 5' YRNA-derived fragment
gtccaatggtagtgggttatcagaact

SEQ ID NO: 27314 - DNA, 25 bp, Artificial Sequence
  synthetic circulating small noncoding RNA (sncRNA) 5' YRNA-derived fragment
ataacccacaacactcagaccaaca

SEQ ID NO: 27315 - DNA, 29 bp, Artificial Sequence
  synthetic circulating small noncoding RNA (sncRNA) 5' YRNA-derived fragment
tagccagtcaaatttagcagttgggggtt

SEQ ID NO: 27316 - DNA, 32 bp, Artificial Sequence
  synthetic circulating small noncoding RNA (sncRNA) 5' YRNA-derived fragment
gtgacactaatgttaataagttctgataaccc

SEQ ID NO: 27317 - DNA, 24 bp, Artificial Sequence
  synthetic circulating small noncoding RNA (sncRNA) 5' YRNA-derived fragment
gcccactgcttcacttgactagcc

SEQ ID NO: 27318 - DNA, 30 bp, Artificial Sequence
  synthetic circulating small noncoding RNA (sncRNA) 5' YRNA-derived fragment
ttctgataacctactaccatcggaccagcc

SEQ ID NO: 27319 - DNA, 30 bp, Artificial Sequence
  synthetic circulating small noncoding RNA (sncRNA) 5' YRNA-derived fragment
actagtcaagtgcagtagtgagaagggggg

SEQ ID NO: 27320 - DNA, 24 bp, Artificial Sequence
  synthetic circulating small noncoding RNA (sncRNA) 5' YRNA-derived fragment
gatggtagtgggttatctgaactt

SEQ ID NO: 27321 - DNA, 26 bp, Artificial Sequence
  synthetic circulating small noncoding RNA (sncRNA) 5' YRNA-derived fragment
ggctggtcagaaggtagtgagttatc

SEQ ID NO: 27322 - DNA, 30 bp, Artificial Sequence
  synthetic circulating small noncoding RNA (sncRNA) 5' YRNA-derived fragment
gctgggccgaaggtagtgagttatctcgat

SEQ ID NO: 27323 - DNA, 32 bp, Artificial Sequence
  synthetic circulating small noncoding RNA (sncRNA) 5' YRNA-derived fragment
ttaaggctagtcaagtgaagcagtgggagtgg

SEQ ID NO: 27324 - DNA, 26 bp, Artificial Sequence
  synthetic circulating small noncoding RNA (sncRNA) 5' YRNA-derived fragment
tagtgggttatcagaacttattaact

SEQ ID NO: 27325 - DNA, 18 bp, Artificial Sequence
  synthetic circulating small noncoding RNA (sncRNA) 5' YRNA-derived fragment
caagtgcagtagtgagca

SEQ ID NO: 27326 - DNA, 29 bp, Artificial Sequence
  synthetic circulating small noncoding RNA (sncRNA) 5' YRNA-derived fragment
ttgtatacaccactgcactcagaccagcc

SEQ ID NO: 27327 - DNA, 21 bp, Artificial Sequence
  synthetic circulating small noncoding RNA (sncRNA) 5' YRNA-derived fragment
cctcgctgctaaatttgactg

SEQ ID NO: 27328 - DNA, 24 bp, Artificial Sequence
  synthetic circulating small noncoding RNA (sncRNA) 5' YRNA-derived fragment
gttctcactactgcacttgactag

SEQ ID NO: 27329 - DNA, 37 bp, Artificial Sequence
  synthetic circulating small noncoding RNA (sncRNA) 5' YRNA-derived fragment
ggctagtctgatggtagtgggttatcagaatttatta

SEQ ID NO: 27330 - DNA, 24 bp, Artificial Sequence
  synthetic circulating small noncoding RNA (sncRNA) 5' YRNA-derived fragment
cgatggtagtgggttatctgaact

SEQ ID NO: 27331 - DNA, 47 bp, Artificial Sequence
  synthetic circulating small noncoding RNA (sncRNA) 5' YRNA-derived fragment
tgtttacaactaattgatcacaaccagttacagatttctttgttcct

SEQ ID NO: 27332 - DNA, 36 bp, Artificial Sequence
  synthetic circulating small noncoding RNA (sncRNA) 5' YRNA-derived fragment
ggctggtccgaatgtagtgagttatctcaattgatt

SEQ ID NO: 27333 - DNA, 35 bp, Artificial Sequence
  synthetic circulating small noncoding RNA (sncRNA) 5' YRNA-derived fragment
taagttctgataacccactaccatcggaccagtcc

SEQ ID NO: 27334 - DNA, 30 bp, Artificial Sequence
  synthetic circulating small noncoding RNA (sncRNA) 5' YRNA-derived fragment
gttaataagttctgataacccactaccatc

SEQ ID NO: 27335 - DNA, 30 bp, Artificial Sequence
  synthetic circulating small noncoding RNA (sncRNA) 5' YRNA-derived fragment
aggagttagatctgtaactgactgtgaaca

SEQ ID NO: 27336 - DNA, 24 bp, Artificial Sequence
  synthetic circulating small noncoding RNA (sncRNA) 5' YRNA-derived fragment
aattctgataacccactaccatca

SEQ ID NO: 27337 - DNA, 19 bp, Artificial Sequence
  synthetic circulating small noncoding RNA (sncRNA) 5' YRNA-derived fragment
tcgctaccttaggaccagc

SEQ ID NO: 27338 - DNA, 29 bp, Artificial Sequence
  synthetic circulating small noncoding RNA (sncRNA) 5' YRNA-derived fragment
cactcccactacttcacttgactagcctt

SEQ ID NO: 27339 - DNA, 21 bp, Artificial Sequence
  synthetic circulating small noncoding RNA (sncRNA) 5' YRNA-derived fragment
cgctgcttcacttgactagcc

SEQ ID NO: 27340 - DNA, 25 bp, Artificial Sequence
  synthetic circulating small noncoding RNA (sncRNA) 5' YRNA-derived fragment
gctgggccgaaggtagtgagttatc

SEQ ID NO: 27341 - DNA, 18 bp, Artificial Sequence
  synthetic circulating small noncoding RNA (sncRNA) 5' YRNA-derived fragment
ggttcactgtcagttacc

SEQ ID NO: 27342 - DNA, 24 bp, Artificial Sequence
  synthetic circulating small noncoding RNA (sncRNA) 5' YRNA-derived fragment
gcttaacaataacccacaacactc

SEQ ID NO: 27343 - DNA, 26 bp, Artificial Sequence
  synthetic circulating small noncoding RNA (sncRNA) 5' YRNA-derived fragment
cctcactgctaaatttaactggcttt

SEQ ID NO: 27344 - DNA, 32 bp, Artificial Sequence
  synthetic circulating small noncoding RNA (sncRNA) 5' YRNA-derived fragment
attgatcacaaccagttacagatttctttgtt

SEQ ID NO: 27345 - DNA, 24 bp, Artificial Sequence
  synthetic circulating small noncoding RNA (sncRNA) 5' YRNA-derived fragment
agctagtcaagtgaagcagtggga

SEQ ID NO: 27346 - DNA, 20 bp, Artificial Sequence
  synthetic circulating small noncoding RNA (sncRNA) 5' YRNA-derived fragment
ttagtgacactaatgttaat

SEQ ID NO: 27347 - DNA, 28 bp, Artificial Sequence
  synthetic circulating small noncoding RNA (sncRNA) 5' YRNA-derived fragment
gttctgataacctactaccatcggacca

SEQ ID NO: 27348 - DNA, 28 bp, Artificial Sequence
  synthetic circulating small noncoding RNA (sncRNA) 5' YRNA-derived fragment
ccagtcaaatttagcagtggggggttgt

SEQ ID NO: 27349 - DNA, 26 bp, Artificial Sequence
  synthetic circulating small noncoding RNA (sncRNA) 5' YRNA-derived fragment
aagccagtcacatttagcagtgtggg

SEQ ID NO: 27350 - DNA, 32 bp, Artificial Sequence
  synthetic circulating small noncoding RNA (sncRNA) 5' YRNA-derived fragment
agttctcataacccaccaccatcagacccgct

SEQ ID NO: 27351 - DNA, 25 bp, Artificial Sequence
  synthetic circulating small noncoding RNA (sncRNA) 5' YRNA-derived fragment
ccactgcttcacttgactagccttt

SEQ ID NO: 27352 - DNA, 23 bp, Artificial Sequence
  synthetic circulating small noncoding RNA (sncRNA) 5' YRNA-derived fragment
tagccagtcagattttagcagtg

SEQ ID NO: 27353 - DNA, 19 bp, Artificial Sequence
  synthetic circulating small noncoding RNA (sncRNA) 5' YRNA-derived fragment
ttatcagaacttattaaca

SEQ ID NO: 27354 - DNA, 28 bp, Artificial Sequence
  synthetic circulating small noncoding RNA (sncRNA) 5' YRNA-derived fragment
tcccactgcttcacttgactagccttta

SEQ ID NO: 27355 - DNA, 31 bp, Artificial Sequence
  synthetic circulating small noncoding RNA (sncRNA) 5' YRNA-derived fragment
ggttggtcctgtggtagtgggttatcagaac

SEQ ID NO: 27356 - DNA, 32 bp, Artificial Sequence
  synthetic circulating small noncoding RNA (sncRNA) 5' YRNA-derived fragment
ggcttgtctgatagtagtgggttatcacagca

SEQ ID NO: 27357 - DNA, 20 bp, Artificial Sequence
  synthetic circulating small noncoding RNA (sncRNA) 5' YRNA-derived fragment
aagacagtcaaatttagcag

SEQ ID NO: 27358 - DNA, 42 bp, Artificial Sequence
  synthetic circulating small noncoding RNA (sncRNA) 5' YRNA-derived fragment
attagtgtcactaaagttggtatacaaccccccactgctaaa

SEQ ID NO: 27359 - DNA, 35 bp, Artificial Sequence
  synthetic circulating small noncoding RNA (sncRNA) 5' YRNA-derived fragment
tggtccgatggtagtgggttatcagaacttattaa

SEQ ID NO: 27360 - DNA, 34 bp, Artificial Sequence
  synthetic circulating small noncoding RNA (sncRNA) 5' YRNA-derived fragment
ctagtcaagtgcagtagtgagaaggggggaaaga

SEQ ID NO: 27361 - DNA, 28 bp, Artificial Sequence
  synthetic circulating small noncoding RNA (sncRNA) 5' YRNA-derived fragment
ttgagataacacactacctttggaccag

SEQ ID NO: 27362 - DNA, 19 bp, Artificial Sequence
  synthetic circulating small noncoding RNA (sncRNA) 5' YRNA-derived fragment
ggcttgtccgagtgcagtg

SEQ ID NO: 27363 - DNA, 40 bp, Artificial Sequence
  synthetic circulating small noncoding RNA (sncRNA) 5' YRNA-derived fragment
aacattagtgtcactaaagttggtatacaaccccccactg

SEQ ID NO: 27364 - DNA, 36 bp, Artificial Sequence
  synthetic circulating small noncoding RNA (sncRNA) 5' YRNA-derived fragment
agttacagatcgaactccttgttctactctttcccc

SEQ ID NO: 27365 - DNA, 25 bp, Artificial Sequence
  synthetic circulating small noncoding RNA (sncRNA) 5' YRNA-derived fragment
ctggtccgaaggtagtgagttatct

SEQ ID NO: 27366 - DNA, 30 bp, Artificial Sequence
  synthetic circulating small noncoding RNA (sncRNA) 5' YRNA-derived fragment
tccaatcccactgcttcacttgactagcct

SEQ ID NO: 27367 - DNA, 36 bp, Artificial Sequence
  synthetic circulating small noncoding RNA (sncRNA) 5' YRNA-derived fragment
tccttctccactcccactgcttcacttgaatagcct

SEQ ID NO: 27368 - DNA, 31 bp, Artificial Sequence
  synthetic circulating small noncoding RNA (sncRNA) 5' YRNA-derived fragment
attgagataactcactaacttcagaccagcc

SEQ ID NO: 27369 - DNA, 24 bp, Artificial Sequence
  synthetic circulating small noncoding RNA (sncRNA) 5' YRNA-derived fragment
gccagtcaaatttagcagttgggg

SEQ ID NO: 27370 - DNA, 46 bp, Artificial Sequence
  synthetic circulating small noncoding RNA (sncRNA) 5' YRNA-derived fragment
cagatttctttgttccttctccattcccactgcttcacttgactag

SEQ ID NO: 27371 - DNA, 25 bp, Artificial Sequence
  synthetic circulating small noncoding RNA (sncRNA) 5' YRNA-derived fragment
gtagtgggttatcagaacttattaa

SEQ ID NO: 27372 - DNA, 24 bp, Artificial Sequence
  synthetic circulating small noncoding RNA (sncRNA) 5' YRNA-derived fragment
aaggctagtcaagtgaagcagtgg

SEQ ID NO: 27373 - DNA, 23 bp, Artificial Sequence
  synthetic circulating small noncoding RNA (sncRNA) 5' YRNA-derived fragment
cagccagtcaaatttagcagtgg

SEQ ID NO: 27374 - DNA, 31 bp, Artificial Sequence
  synthetic circulating small noncoding RNA (sncRNA) 5' YRNA-derived fragment
ggctgatccgaaggtagtgagttatgtcagt

SEQ ID NO: 27375 - DNA, 18 bp, Artificial Sequence
  synthetic circulating small noncoding RNA (sncRNA) 5' YRNA-derived fragment
ctactacacttgactagt

SEQ ID NO: 27376 - DNA, 25 bp, Artificial Sequence
  synthetic circulating small noncoding RNA (sncRNA) 5' YRNA-derived fragment
aagccagtcaaatttatcagagggg

SEQ ID NO: 27377 - DNA, 22 bp, Artificial Sequence
  synthetic circulating small noncoding RNA (sncRNA) 5' YRNA-derived fragment
tcccagtggttcacttgactag

SEQ ID NO: 27378 - DNA, 33 bp, Artificial Sequence
  synthetic circulating small noncoding RNA (sncRNA) 5' YRNA-derived fragment
aggctagtgaagtgaagcagttggagtggagaa

SEQ ID NO: 27379 - DNA, 24 bp, Artificial Sequence
  synthetic circulating small noncoding RNA (sncRNA) 5' YRNA-derived fragment
ggcagtcaaatttagcagtggggg

SEQ ID NO: 27380 - DNA, 25 bp, Artificial Sequence
  synthetic circulating small noncoding RNA (sncRNA) 5' YRNA-derived fragment
ccaatgatagtgggttatcagaact

SEQ ID NO: 27381 - DNA, 27 bp, Artificial Sequence
  synthetic circulating small noncoding RNA (sncRNA) 5' YRNA-derived fragment
tttggtccaatggtagtgggttatcag

SEQ ID NO: 27382 - DNA, 31 bp, Artificial Sequence
  synthetic circulating small noncoding RNA (sncRNA) 5' YRNA-derived fragment
actcccactgcttcacttgactagccttttg

SEQ ID NO: 27383 - DNA, 26 bp, Artificial Sequence
  synthetic circulating small noncoding RNA (sncRNA) 5' YRNA-derived fragment
tcccagtgcttcacttgactagcctt

SEQ ID NO: 27384 - DNA, 26 bp, Artificial Sequence
  synthetic circulating small noncoding RNA (sncRNA) 5' YRNA-derived fragment
ggctagtccgaaggtagagagttatc

SEQ ID NO: 27385 - DNA, 26 bp, Artificial Sequence
  synthetic circulating small noncoding RNA (sncRNA) 5' YRNA-derived fragment
cttctctctactgcaattgactagtc

SEQ ID NO: 27386 - DNA, 24 bp, Artificial Sequence
  synthetic circulating small noncoding RNA (sncRNA) 5' YRNA-derived fragment
cttctgactactgcacttgagtag

SEQ ID NO: 27387 - DNA, 29 bp, Artificial Sequence
  synthetic circulating small noncoding RNA (sncRNA) 5' YRNA-derived fragment
ggtccaatggtagtggtttatcagaactt

SEQ ID NO: 27388 - DNA, 25 bp, Artificial Sequence
  synthetic circulating small noncoding RNA (sncRNA) 5' YRNA-derived fragment
gccagtaaaatttagcagtggggag

SEQ ID NO: 27389 - DNA, 34 bp, Artificial Sequence
  synthetic circulating small noncoding RNA (sncRNA) 5' YRNA-derived fragment
agactagtcaagtgaagcagtgggagtggagaag

SEQ ID NO: 27390 - DNA, 25 bp, Artificial Sequence
  synthetic circulating small noncoding RNA (sncRNA) 5' YRNA-derived fragment
caaaggttgtgggttattgttaagt

SEQ ID NO: 27391 - DNA, 30 bp, Artificial Sequence
  synthetic circulating small noncoding RNA (sncRNA) 5' YRNA-derived fragment
cttgtaaacaccactgcactcggaccagcc

SEQ ID NO: 27392 - DNA, 34 bp, Artificial Sequence
  synthetic circulating small noncoding RNA (sncRNA) 5' YRNA-derived fragment
actaaagttggtatacaaccccccactgctaaat

SEQ ID NO: 27393 - DNA, 35 bp, Artificial Sequence
  synthetic circulating small noncoding RNA (sncRNA) 5' YRNA-derived fragment
ttagtgacactaatgttaataagttctgataaccc

SEQ ID NO: 27394 - DNA, 27 bp, Artificial Sequence
  synthetic circulating small noncoding RNA (sncRNA) 5' YRNA-derived fragment
ggctggtctgaaggtagtgggttatct

SEQ ID NO: 27395 - DNA, 39 bp, Artificial Sequence
  synthetic circulating small noncoding RNA (sncRNA) 5' YRNA-derived fragment
tgggttatcagaacttattaacattagtgtcactaaagt

SEQ ID NO: 27396 - DNA, 26 bp, Artificial Sequence
  synthetic circulating small noncoding RNA (sncRNA) 5' YRNA-derived fragment
agttctgataacccatcggaccagcc

SEQ ID NO: 27397 - DNA, 19 bp, Artificial Sequence
  synthetic circulating small noncoding RNA (sncRNA) 5' YRNA-derived fragment
aaagccagtcaaatttaac

SEQ ID NO: 27398 - DNA, 27 bp, Artificial Sequence
  synthetic circulating small noncoding RNA (sncRNA) 5' YRNA-derived fragment
agataactcactacctttggaccagac

SEQ ID NO: 27399 - DNA, 31 bp, Artificial Sequence
  synthetic circulating small noncoding RNA (sncRNA) 5' YRNA-derived fragment
agttctgataacccactaccattggacaagc

SEQ ID NO: 27400 - DNA, 20 bp, Artificial Sequence
  synthetic circulating small noncoding RNA (sncRNA) 5' YRNA-derived fragment
agtagaataaggagtttgat

SEQ ID NO: 27401 - DNA, 37 bp, Artificial Sequence
  synthetic circulating small noncoding RNA (sncRNA) 5' YRNA-derived fragment
tagtgggttatcagaacttattaacattagtgtcact

SEQ ID NO: 27402 - DNA, 18 bp, Artificial Sequence
  synthetic circulating small noncoding RNA (sncRNA) 5' YRNA-derived fragment
actaccattggaccaggc

SEQ ID NO: 27403 - DNA, 36 bp, Artificial Sequence
  synthetic circulating small noncoding RNA (sncRNA) 5' YRNA-derived fragment
agtaagctctgacaacccactaccatcggaccagcc

SEQ ID NO: 27404 - DNA, 27 bp, Artificial Sequence
  synthetic circulating small noncoding RNA (sncRNA) 5' YRNA-derived fragment
gtaaacaccactgcactcagaccagac

SEQ ID NO: 27405 - DNA, 21 bp, Artificial Sequence
  synthetic circulating small noncoding RNA (sncRNA) 5' YRNA-derived fragment
cttaacaataacccacaacac

SEQ ID NO: 27406 - DNA, 23 bp, Artificial Sequence
  synthetic circulating small noncoding RNA (sncRNA) 5' YRNA-derived fragment
ggccggtctgaaggtagtgagtt

SEQ ID NO: 27407 - DNA, 28 bp, Artificial Sequence
  synthetic circulating small noncoding RNA (sncRNA) 5' YRNA-derived fragment
tgattgtctgaaggtagtgagttatctc

SEQ ID NO: 27408 - DNA, 25 bp, Artificial Sequence
  synthetic circulating small noncoding RNA (sncRNA) 5' YRNA-derived fragment
cttctcactactgcacttgactaat

SEQ ID NO: 27409 - DNA, 29 bp, Artificial Sequence
  synthetic circulating small noncoding RNA (sncRNA) 5' YRNA-derived fragment
ggctggtctgagtgcattggtgtttacaa

SEQ ID NO: 27410 - DNA, 33 bp, Artificial Sequence
  synthetic circulating small noncoding RNA (sncRNA) 5' YRNA-derived fragment
gttaataagttctgataacccactaccatcgga

SEQ ID NO: 27411 - DNA, 43 bp, Artificial Sequence
  synthetic circulating small noncoding RNA (sncRNA) 5' YRNA-derived fragment
aagactagtcaagtgaagcagtgggagtggagaaggaacaaag

SEQ ID NO: 27412 - DNA, 19 bp, Artificial Sequence
  synthetic circulating small noncoding RNA (sncRNA) 5' YRNA-derived fragment
cctaaatttgcctggcttt

SEQ ID NO: 27413 - DNA, 26 bp, Artificial Sequence
  synthetic circulating small noncoding RNA (sncRNA) 5' YRNA-derived fragment
ggctagtcaagtgcagtagtgagaag

SEQ ID NO: 27414 - DNA, 21 bp, Artificial Sequence
  synthetic circulating small noncoding RNA (sncRNA) 5' YRNA-derived fragment
ttcaaatttagcagtgggggg

SEQ ID NO: 27415 - DNA, 26 bp, Artificial Sequence
  synthetic circulating small noncoding RNA (sncRNA) 5' YRNA-derived fragment
ctagtcaagtgaagcagtgggagtgg

SEQ ID NO: 27416 - DNA, 24 bp, Artificial Sequence
  synthetic circulating small noncoding RNA (sncRNA) 5' YRNA-derived fragment
ctggtccgaaggtaaggagttatc

SEQ ID NO: 27417 - DNA, 29 bp, Artificial Sequence
  synthetic circulating small noncoding RNA (sncRNA) 5' YRNA-derived fragment
tagtcctgtggtagtgggttatcagaact

SEQ ID NO: 27418 - DNA, 30 bp, Artificial Sequence
  synthetic circulating small noncoding RNA (sncRNA) 5' YRNA-derived fragment
ggctggttcgaatgcagtggtgtttacaac

SEQ ID NO: 27419 - DNA, 25 bp, Artificial Sequence
  synthetic circulating small noncoding RNA (sncRNA) 5' YRNA-derived fragment
ccccccttctcactactgcacttga

SEQ ID NO: 27420 - DNA, 42 bp, Artificial Sequence
  synthetic circulating small noncoding RNA (sncRNA) 5' YRNA-derived fragment
aatgttaataagttctgataacccactaccatcggaccagtc

SEQ ID NO: 27421 - DNA, 36 bp, Artificial Sequence
  synthetic circulating small noncoding RNA (sncRNA) 5' YRNA-derived fragment
taataagttctgataacccactaccattggaccacc

SEQ ID NO: 27422 - DNA, 25 bp, Artificial Sequence
  synthetic circulating small noncoding RNA (sncRNA) 5' YRNA-derived fragment
tgagttctgataacccactaccatc

SEQ ID NO: 27423 - DNA, 35 bp, Artificial Sequence
  synthetic circulating small noncoding RNA (sncRNA) 5' YRNA-derived fragment
ggctggtctgatggtagtgggttatcagaacttat

SEQ ID NO: 27424 - DNA, 34 bp, Artificial Sequence
  synthetic circulating small noncoding RNA (sncRNA) 5' YRNA-derived fragment
tagacagtcacatttagtagtggggggttgtata

SEQ ID NO: 27425 - DNA, 28 bp, Artificial Sequence
  synthetic circulating small noncoding RNA (sncRNA) 5' YRNA-derived fragment
actcccactgtttcacttgactagcctt

SEQ ID NO: 27426 - DNA, 19 bp, Artificial Sequence
  synthetic circulating small noncoding RNA (sncRNA) 5' YRNA-derived fragment
agattttagcagtgggggg

SEQ ID NO: 27427 - DNA, 27 bp, Artificial Sequence
  synthetic circulating small noncoding RNA (sncRNA) 5' YRNA-derived fragment
acaaccccccactgctaaatttgactg

SEQ ID NO: 27428 - DNA, 29 bp, Artificial Sequence
  synthetic circulating small noncoding RNA (sncRNA) 5' YRNA-derived fragment
tccattcccactgcttcacttgactagtt

SEQ ID NO: 27429 - DNA, 25 bp, Artificial Sequence
  synthetic circulating small noncoding RNA (sncRNA) 5' YRNA-derived fragment
agcttaacaataacccacaacactc

SEQ ID NO: 27430 - DNA, 29 bp, Artificial Sequence
  synthetic circulating small noncoding RNA (sncRNA) 5' YRNA-derived fragment
tccactcccactgcttcacttgaatagcc

SEQ ID NO: 27431 - DNA, 18 bp, Artificial Sequence
  synthetic circulating small noncoding RNA (sncRNA) 5' YRNA-derived fragment
actaaatttgactggctt

SEQ ID NO: 27432 - DNA, 24 bp, Artificial Sequence
  synthetic circulating small noncoding RNA (sncRNA) 5' YRNA-derived fragment
cctagtcaagtgaagcagtgggag

SEQ ID NO: 27433 - DNA, 24 bp, Artificial Sequence
  synthetic circulating small noncoding RNA (sncRNA) 5' YRNA-derived fragment
cttctcactactgcacttggctag

SEQ ID NO: 27434 - DNA, 20 bp, Artificial Sequence
  synthetic circulating small noncoding RNA (sncRNA) 5' YRNA-derived fragment
aaggtagtgagttatctcaa

SEQ ID NO: 27435 - DNA, 24 bp, Artificial Sequence
  synthetic circulating small noncoding RNA (sncRNA) 5' YRNA-derived fragment
gccagtcaaatttatcagaggggg

SEQ ID NO: 27436 - DNA, 25 bp, Artificial Sequence
  synthetic circulating small noncoding RNA (sncRNA) 5' YRNA-derived fragment
tgataacccactaccatcggaccag

SEQ ID NO: 27437 - DNA, 23 bp, Artificial Sequence
  synthetic circulating small noncoding RNA (sncRNA) 5' YRNA-derived fragment
tcccactgcttcacttggctagc

SEQ ID NO: 27438 - DNA, 18 bp, Artificial Sequence
  synthetic circulating small noncoding RNA (sncRNA) 5' YRNA-derived fragment
aacgccagtcaaatttag

SEQ ID NO: 27439 - DNA, 23 bp, Artificial Sequence
  synthetic circulating small noncoding RNA (sncRNA) 5' YRNA-derived fragment
acagtcacatttagtagtggggg

SEQ ID NO: 27440 - DNA, 29 bp, Artificial Sequence
  synthetic circulating small noncoding RNA (sncRNA) 5' YRNA-derived fragment
ttcagccagtcaaatttagcagtgggggg

SEQ ID NO: 27441 - DNA, 18 bp, Artificial Sequence
  synthetic circulating small noncoding RNA (sncRNA) 5' YRNA-derived fragment
cccccactgctaaatttt

SEQ ID NO: 27442 - DNA, 31 bp, Artificial Sequence
  synthetic circulating small noncoding RNA (sncRNA) 5' YRNA-derived fragment
attgagataactcactaccttctgactggcc

SEQ ID NO: 27443 - DNA, 21 bp, Artificial Sequence
  synthetic circulating small noncoding RNA (sncRNA) 5' YRNA-derived fragment
ctcccactgcttcacttggct

SEQ ID NO: 27444 - DNA, 32 bp, Artificial Sequence
  synthetic circulating small noncoding RNA (sncRNA) 5' YRNA-derived fragment
cagtcagttacagatcgaactccttgttctac

SEQ ID NO: 27445 - DNA, 21 bp, Artificial Sequence
  synthetic circulating small noncoding RNA (sncRNA) 5' YRNA-derived fragment
cactgctaaatttaactggct

SEQ ID NO: 27446 - DNA, 20 bp, Artificial Sequence
  synthetic circulating small noncoding RNA (sncRNA) 5' YRNA-derived fragment
ggctggtctgaaggtagtgg

SEQ ID NO: 27447 - DNA, 19 bp, Artificial Sequence
  synthetic circulating small noncoding RNA (sncRNA) 5' YRNA-derived fragment
attgctaaatttgactggc

SEQ ID NO: 27448 - DNA, 26 bp, Artificial Sequence
  synthetic circulating small noncoding RNA (sncRNA) 5' YRNA-derived fragment
agctagtcaaatttagcagtgggggg

SEQ ID NO: 27449 - DNA, 29 bp, Artificial Sequence
  synthetic circulating small noncoding RNA (sncRNA) 5' YRNA-derived fragment
ttgagataactcactaccttggaccagcc

SEQ ID NO: 27450 - DNA, 25 bp, Artificial Sequence
  synthetic circulating small noncoding RNA (sncRNA) 5' YRNA-derived fragment
cttctcaccactgcacttgactagt

SEQ ID NO: 27451 - DNA, 28 bp, Artificial Sequence
  synthetic circulating small noncoding RNA (sncRNA) 5' YRNA-derived fragment
aaaagccagccaaatttcgcagtggggg

SEQ ID NO: 27452 - DNA, 24 bp, Artificial Sequence
  synthetic circulating small noncoding RNA (sncRNA) 5' YRNA-derived fragment
taagccagtcaaatttagcagtgg

SEQ ID NO: 27453 - DNA, 31 bp, Artificial Sequence
  synthetic circulating small noncoding RNA (sncRNA) 5' YRNA-derived fragment
agttgtaaactccactgcactcggaccagca

SEQ ID NO: 27454 - DNA, 21 bp, Artificial Sequence
  synthetic circulating small noncoding RNA (sncRNA) 5' YRNA-derived fragment
ggagaaggaacaaagaaatat

SEQ ID NO: 27455 - DNA, 24 bp, Artificial Sequence
  synthetic circulating small noncoding RNA (sncRNA) 5' YRNA-derived fragment
ccctgtgctaaatttgactgcctt

SEQ ID NO: 27456 - DNA, 23 bp, Artificial Sequence
  synthetic circulating small noncoding RNA (sncRNA) 5' YRNA-derived fragment
ccccacactgccaaatttgactg

SEQ ID NO: 27457 - DNA, 27 bp, Artificial Sequence
  synthetic circulating small noncoding RNA (sncRNA) 5' YRNA-derived fragment
ccccccacaaccacgcttgactagctt

SEQ ID NO: 27458 - DNA, 44 bp, Artificial Sequence
  synthetic circulating small noncoding RNA (sncRNA) 5' YRNA-derived fragment
aagccagtaaaatttagcagtggggagttgtataccaactttag

SEQ ID NO: 27459 - DNA, 28 bp, Artificial Sequence
  synthetic circulating small noncoding RNA (sncRNA) 5' YRNA-derived fragment
gccattcaaatttagcagtggggggttg

SEQ ID NO: 27460 - DNA, 21 bp, Artificial Sequence
  synthetic circulating small noncoding RNA (sncRNA) 5' YRNA-derived fragment
acttcagtgacactaatgtta

SEQ ID NO: 27461 - DNA, 28 bp, Artificial Sequence
  synthetic circulating small noncoding RNA (sncRNA) 5' YRNA-derived fragment
ttgagataacccactaccttcggacgag

SEQ ID NO: 27462 - DNA, 37 bp, Artificial Sequence
  synthetic circulating small noncoding RNA (sncRNA) 5' YRNA-derived fragment
caatcaattgagataactcactacctttggaccagac

SEQ ID NO: 27463 - DNA, 46 bp, Artificial Sequence
  synthetic circulating small noncoding RNA (sncRNA) 5' YRNA-derived fragment
tcagccagtcaaatttagcagtggggggttgtataccaactttagt

SEQ ID NO: 27464 - DNA, 36 bp, Artificial Sequence
  synthetic circulating small noncoding RNA (sncRNA) 5' YRNA-derived fragment
tctccactcccactgcttcacttgactagcctttta

SEQ ID NO: 27465 - DNA, 22 bp, Artificial Sequence
  synthetic circulating small noncoding RNA (sncRNA) 5' YRNA-derived fragment
tcccactgcttcacttaactag

SEQ ID NO: 27466 - DNA, 22 bp, Artificial Sequence
  synthetic circulating small noncoding RNA (sncRNA) 5' YRNA-derived fragment
agtcaagcgtggttgtgggggg

SEQ ID NO: 27467 - DNA, 19 bp, Artificial Sequence
  synthetic circulating small noncoding RNA (sncRNA) 5' YRNA-derived fragment
ccccccactgctaaatttg

SEQ ID NO: 27468 - DNA, 19 bp, Artificial Sequence
  synthetic circulating small noncoding RNA (sncRNA) 5' YRNA-derived fragment
tcaagtgcagtagtgagaa

SEQ ID NO: 27469 - DNA, 22 bp, Artificial Sequence
  synthetic circulating small noncoding RNA (sncRNA) 5' YRNA-derived fragment
ccccacaaccacgcttgactag

SEQ ID NO: 27470 - DNA, 22 bp, Artificial Sequence
  synthetic circulating small noncoding RNA (sncRNA) 5' YRNA-derived fragment
gttctgatagcccactaccatc

SEQ ID NO: 27471 - DNA, 27 bp, Artificial Sequence
  synthetic circulating small noncoding RNA (sncRNA) 5' YRNA-derived fragment
gagtagaacaaggagttcgatctgtaa

SEQ ID NO: 27472 - DNA, 27 bp, Artificial Sequence
  synthetic circulating small noncoding RNA (sncRNA) 5' YRNA-derived fragment
aaaagccagtcaaatttagcagtgggg

SEQ ID NO: 27473 - DNA, 30 bp, Artificial Sequence
  synthetic circulating small noncoding RNA (sncRNA) 5' YRNA-derived fragment
ctagtcaagtgaagcagtgggagtggagaa

SEQ ID NO: 27474 - DNA, 21 bp, Artificial Sequence
  synthetic circulating small noncoding RNA (sncRNA) 5' YRNA-derived fragment
caacattagtgtcacgaaagt

SEQ ID NO: 27475 - DNA, 29 bp, Artificial Sequence
  synthetic circulating small noncoding RNA (sncRNA) 5' YRNA-derived fragment
tgattgtctgaaggtagtgagttatctca

SEQ ID NO: 27476 - DNA, 35 bp, Artificial Sequence
  synthetic circulating small noncoding RNA (sncRNA) 5' YRNA-derived fragment
tttggtccaatggtagtgggttatcagaacttatt

SEQ ID NO: 27477 - DNA, 23 bp, Artificial Sequence
  synthetic circulating small noncoding RNA (sncRNA) 5' YRNA-derived fragment
cacagtcagttacagatcgaact

SEQ ID NO: 27478 - DNA, 32 bp, Artificial Sequence
  synthetic circulating small noncoding RNA (sncRNA) 5' YRNA-derived fragment
ggctggtccaatagtagtgggttatcagaact

SEQ ID NO: 27479 - DNA, 18 bp, Artificial Sequence
  synthetic circulating small noncoding RNA (sncRNA) 5' YRNA-derived fragment
agttctgataacctacta

SEQ ID NO: 27480 - DNA, 31 bp, Artificial Sequence
  synthetic circulating small noncoding RNA (sncRNA) 5' YRNA-derived fragment
acctcccactgctaaatttgactggcttatt

SEQ ID NO: 27481 - DNA, 29 bp, Artificial Sequence
  synthetic circulating small noncoding RNA (sncRNA) 5' YRNA-derived fragment
ttaataagttctgataacccactaccatc

SEQ ID NO: 27482 - DNA, 36 bp, Artificial Sequence
  synthetic circulating small noncoding RNA (sncRNA) 5' YRNA-derived fragment
ttcttctccactcccactgcttcacttgactagcct

SEQ ID NO: 27483 - DNA, 28 bp, Artificial Sequence
  synthetic circulating small noncoding RNA (sncRNA) 5' YRNA-derived fragment
tgtctcactactgcacttgactagtctt

SEQ ID NO: 27484 - DNA, 40 bp, Artificial Sequence
  synthetic circulating small noncoding RNA (sncRNA) 5' YRNA-derived fragment
ttcagtcaaatttagcagtggggggttgtataccaacttt

SEQ ID NO: 27485 - DNA, 29 bp, Artificial Sequence
  synthetic circulating small noncoding RNA (sncRNA) 5' YRNA-derived fragment
ttctgataacccactaccattggaccacc

SEQ ID NO: 27486 - DNA, 29 bp, Artificial Sequence
  synthetic circulating small noncoding RNA (sncRNA) 5' YRNA-derived fragment
ttcagataactcactaccttcagaccagt

SEQ ID NO: 27487 - DNA, 25 bp, Artificial Sequence
  synthetic circulating small noncoding RNA (sncRNA) 5' YRNA-derived fragment
ccgctagtcaagtgaagcagtggga

SEQ ID NO: 27488 - DNA, 32 bp, Artificial Sequence
  synthetic circulating small noncoding RNA (sncRNA) 5' YRNA-derived fragment
acaacccccaactgctaaatttgactggcttt

SEQ ID NO: 27489 - DNA, 27 bp, Artificial Sequence
  synthetic circulating small noncoding RNA (sncRNA) 5' YRNA-derived fragment
ccgagtgttgtgggttattgttaagtt

SEQ ID NO: 27490 - DNA, 26 bp, Artificial Sequence
  synthetic circulating small noncoding RNA (sncRNA) 5' YRNA-derived fragment
tcccactgcttcacttgactagccat

SEQ ID NO: 27491 - DNA, 27 bp, Artificial Sequence
  synthetic circulating small noncoding RNA (sncRNA) 5' YRNA-derived fragment
gtctcactactgcacttgactagtctt

SEQ ID NO: 27492 - DNA, 28 bp, Artificial Sequence
  synthetic circulating small noncoding RNA (sncRNA) 5' YRNA-derived fragment
tccgatggtagtgggttatcagaactta

SEQ ID NO: 27493 - DNA, 23 bp, Artificial Sequence
  synthetic circulating small noncoding RNA (sncRNA) 5' YRNA-derived fragment
aactcactacctttggacaagcc

SEQ ID NO: 27494 - DNA, 27 bp, Artificial Sequence
  synthetic circulating small noncoding RNA (sncRNA) 5' YRNA-derived fragment
aaggctagtcaagtgaaacagtgggag

SEQ ID NO: 27495 - DNA, 28 bp, Artificial Sequence
  synthetic circulating small noncoding RNA (sncRNA) 5' YRNA-derived fragment
agactagtcaagtgaagcagtgggagtg

SEQ ID NO: 27496 - DNA, 23 bp, Artificial Sequence
  synthetic circulating small noncoding RNA (sncRNA) 5' YRNA-derived fragment
agttctgataactcattaccatc

SEQ ID NO: 27497 - DNA, 22 bp, Artificial Sequence
  synthetic circulating small noncoding RNA (sncRNA) 5' YRNA-derived fragment
ggctggtccgatggtagtgatt

SEQ ID NO: 27498 - DNA, 32 bp, Artificial Sequence
  synthetic circulating small noncoding RNA (sncRNA) 5' YRNA-derived fragment
aactgagataactcactaccttcagaccagcc

SEQ ID NO: 27499 - DNA, 33 bp, Artificial Sequence
  synthetic circulating small noncoding RNA (sncRNA) 5' YRNA-derived fragment
ttccccccttctcactactgcacttgactaata

SEQ ID NO: 27500 - DNA, 25 bp, Artificial Sequence
  synthetic circulating small noncoding RNA (sncRNA) 5' YRNA-derived fragment
ccctctgcttcacttgactagccta

SEQ ID NO: 27501 - DNA, 27 bp, Artificial Sequence
  synthetic circulating small noncoding RNA (sncRNA) 5' YRNA-derived fragment
cttctgactactgcacttgagtagtct

SEQ ID NO: 27502 - DNA, 23 bp, Artificial Sequence
  synthetic circulating small noncoding RNA (sncRNA) 5' YRNA-derived fragment
ggctggttcaaaggtagtgagtt

SEQ ID NO: 27503 - DNA, 20 bp, Artificial Sequence
  synthetic circulating small noncoding RNA (sncRNA) 5' YRNA-derived fragment
accttagtgacactaatatt

SEQ ID NO: 27504 - DNA, 29 bp, Artificial Sequence
  synthetic circulating small noncoding RNA (sncRNA) 5' YRNA-derived fragment
aaaggctagtcaagtgaagcagtgggagt

SEQ ID NO: 27505 - DNA, 27 bp, Artificial Sequence
  synthetic circulating small noncoding RNA (sncRNA) 5' YRNA-derived fragment
ccgatggtagtgggttatcagaactta

SEQ ID NO: 27506 - DNA, 18 bp, Artificial Sequence
  synthetic circulating small noncoding RNA (sncRNA) 5' YRNA-derived fragment
aagccagttaaatttagc

SEQ ID NO: 27507 - DNA, 32 bp, Artificial Sequence
  synthetic circulating small noncoding RNA (sncRNA) 5' YRNA-derived fragment
aacaaagaaatctgtaactggttgtgatcaat

SEQ ID NO: 27508 - DNA, 23 bp, Artificial Sequence
  synthetic circulating small noncoding RNA (sncRNA) 5' YRNA-derived fragment
cagatcaacctccttgttctact

SEQ ID NO: 27509 - DNA, 23 bp, Artificial Sequence
  synthetic circulating small noncoding RNA (sncRNA) 5' YRNA-derived fragment
aactcgctaccttaggaccagcc

SEQ ID NO: 27510 - DNA, 27 bp, Artificial Sequence
  synthetic circulating small noncoding RNA (sncRNA) 5' YRNA-derived fragment
agccagtcaaatttagcagtgggggat

SEQ ID NO: 27511 - DNA, 29 bp, Artificial Sequence
  synthetic circulating small noncoding RNA (sncRNA) 5' YRNA-derived fragment
tgatcacaaccagttacagatttctttgt

SEQ ID NO: 27512 - DNA, 25 bp, Artificial Sequence
  synthetic circulating small noncoding RNA (sncRNA) 5' YRNA-derived fragment
ataacccactaccatcgaaccagcc

SEQ ID NO: 27513 - DNA, 38 bp, Artificial Sequence
  synthetic circulating small noncoding RNA (sncRNA) 5' YRNA-derived fragment
ctctttccccccttctcactactgcacttgactagtct

SEQ ID NO: 27514 - DNA, 26 bp, Artificial Sequence
  synthetic circulating small noncoding RNA (sncRNA) 5' YRNA-derived fragment
cgatggtagtgatttatcagaactta

SEQ ID NO: 27515 - DNA, 40 bp, Artificial Sequence
  synthetic circulating small noncoding RNA (sncRNA) 5' YRNA-derived fragment
ggctggtccgatggtagcaggttatcagaacttattaaca

SEQ ID NO: 27516 - DNA, 18 bp, Artificial Sequence
  synthetic circulating small noncoding RNA (sncRNA) 5' YRNA-derived fragment
cactgctaaatttgactg

SEQ ID NO: 27517 - DNA, 33 bp, Artificial Sequence
  synthetic circulating small noncoding RNA (sncRNA) 5' YRNA-derived fragment
ttccccccttctcactactgcacttgactagtc

SEQ ID NO: 27518 - DNA, 33 bp, Artificial Sequence
  synthetic circulating small noncoding RNA (sncRNA) 5' YRNA-derived fragment
cagatttctttgttccttctccactcccactgc

SEQ ID NO: 27519 - DNA, 32 bp, Artificial Sequence
  synthetic circulating small noncoding RNA (sncRNA) 5' YRNA-derived fragment
agccagtcaaatttagcagtggagggttgtgt

SEQ ID NO: 27520 - DNA, 30 bp, Artificial Sequence
  synthetic circulating small noncoding RNA (sncRNA) 5' YRNA-derived fragment
gctggtcctatggtagtgggttatcagaac

SEQ ID NO: 27521 - DNA, 27 bp, Artificial Sequence
  synthetic circulating small noncoding RNA (sncRNA) 5' YRNA-derived fragment
gctggtccaatggtagtggtttatcag

SEQ ID NO: 27522 - DNA, 22 bp, Artificial Sequence
  synthetic circulating small noncoding RNA (sncRNA) 5' YRNA-derived fragment
cttaacaataacccacaacact

SEQ ID NO: 27523 - DNA, 32 bp, Artificial Sequence
  synthetic circulating small noncoding RNA (sncRNA) 5' YRNA-derived fragment
gctggtccgatggtagcaggttatcagaactt

SEQ ID NO: 27524 - DNA, 19 bp, Artificial Sequence
  synthetic circulating small noncoding RNA (sncRNA) 5' YRNA-derived fragment
caagtgaagcagtgggagt

SEQ ID NO: 27525 - DNA, 27 bp, Artificial Sequence
  synthetic circulating small noncoding RNA (sncRNA) 5' YRNA-derived fragment
gttctgataacccactaccatcagact

SEQ ID NO: 27526 - DNA, 21 bp, Artificial Sequence
  synthetic circulating small noncoding RNA (sncRNA) 5' YRNA-derived fragment
gggaaagagtagaacaaggag

SEQ ID NO: 27527 - DNA, 31 bp, Artificial Sequence
  synthetic circulating small noncoding RNA (sncRNA) 5' YRNA-derived fragment
agccagtcaaatttagcagtggggggctata

SEQ ID NO: 27528 - DNA, 28 bp, Artificial Sequence
  synthetic circulating small noncoding RNA (sncRNA) 5' YRNA-derived fragment
cagttaaacttagcagtggagagttgta

SEQ ID NO: 27529 - DNA, 27 bp, Artificial Sequence
  synthetic circulating small noncoding RNA (sncRNA) 5' YRNA-derived fragment
gggaaagagtagaacaaggagtctgat

SEQ ID NO: 27530 - DNA, 27 bp, Artificial Sequence
  synthetic circulating small noncoding RNA (sncRNA) 5' YRNA-derived fragment
ctccccccacaaccgcgcttgactagc

SEQ ID NO: 27531 - DNA, 24 bp, Artificial Sequence
  synthetic circulating small noncoding RNA (sncRNA) 5' YRNA-derived fragment
agctctgacaacccactaccatcg

SEQ ID NO: 27532 - DNA, 22 bp, Artificial Sequence
  synthetic circulating small noncoding RNA (sncRNA) 5' YRNA-derived fragment
tctccactcccactgcttcact

SEQ ID NO: 27533 - DNA, 26 bp, Artificial Sequence
  synthetic circulating small noncoding RNA (sncRNA) 5' YRNA-derived fragment
aggctagtcaagtgaagcagtgagag

SEQ ID NO: 27534 - DNA, 33 bp, Artificial Sequence
  synthetic circulating small noncoding RNA (sncRNA) 5' YRNA-derived fragment
cttctccattcccactgcttcacttgactagtt

SEQ ID NO: 27535 - DNA, 27 bp, Artificial Sequence
  synthetic circulating small noncoding RNA (sncRNA) 5' YRNA-derived fragment
aagccagtcaagtttagcagtgtaggg

SEQ ID NO: 27536 - DNA, 46 bp, Artificial Sequence
  synthetic circulating small noncoding RNA (sncRNA) 5' YRNA-derived fragment
aagctattcaagtgaagcagtgggagtggagaaggaacaaagtaat

SEQ ID NO: 27537 - DNA, 32 bp, Artificial Sequence
  synthetic circulating small noncoding RNA (sncRNA) 5' YRNA-derived fragment
aataaattctgataacccactaccatcagacc

SEQ ID NO: 27538 - DNA, 26 bp, Artificial Sequence
  synthetic circulating small noncoding RNA (sncRNA) 5' YRNA-derived fragment
cccctcgctgctaaatttgactggct

SEQ ID NO: 27539 - DNA, 28 bp, Artificial Sequence
  synthetic circulating small noncoding RNA (sncRNA) 5' YRNA-derived fragment
aagcctagtcaagtgaagcagtgggagt

SEQ ID NO: 27540 - DNA, 30 bp, Artificial Sequence
  synthetic circulating small noncoding RNA (sncRNA) 5' YRNA-derived fragment
agaacttattaacattagtgtcactaaagt

SEQ ID NO: 27541 - DNA, 37 bp, Artificial Sequence
  synthetic circulating small noncoding RNA (sncRNA) 5' YRNA-derived fragment
aaggctagtcaagtgaagcagtgggagtggagaagga

SEQ ID NO: 27542 - DNA, 30 bp, Artificial Sequence
  synthetic circulating small noncoding RNA (sncRNA) 5' YRNA-derived fragment
tggagataactcactaccttcagaccagcc

SEQ ID NO: 27543 - DNA, 19 bp, Artificial Sequence
  synthetic circulating small noncoding RNA (sncRNA) 5' YRNA-derived fragment
tttctgataacccactacc

SEQ ID NO: 27544 - DNA, 31 bp, Artificial Sequence
  synthetic circulating small noncoding RNA (sncRNA) 5' YRNA-derived fragment
agccagttaactttagcagtagggggttgta

SEQ ID NO: 27545 - DNA, 25 bp, Artificial Sequence
  synthetic circulating small noncoding RNA (sncRNA) 5' YRNA-derived fragment
cttctcactactgcacttgagtagt

SEQ ID NO: 27546 - DNA, 18 bp, Artificial Sequence
  synthetic circulating small noncoding RNA (sncRNA) 5' YRNA-derived fragment
cccactgcttcacttgac

SEQ ID NO: 27547 - DNA, 20 bp, Artificial Sequence
  synthetic circulating small noncoding RNA (sncRNA) 5' YRNA-derived fragment
agctagtcaaatttagcagt

SEQ ID NO: 27548 - DNA, 19 bp, Artificial Sequence
  synthetic circulating small noncoding RNA (sncRNA) 5' YRNA-derived fragment
aaagccagtcaaggttagc

SEQ ID NO: 27549 - DNA, 29 bp, Artificial Sequence
  synthetic circulating small noncoding RNA (sncRNA) 5' YRNA-derived fragment
tggtctgatggtagtgggttatcagagct

SEQ ID NO: 27550 - DNA, 24 bp, Artificial Sequence
  synthetic circulating small noncoding RNA (sncRNA) 5' YRNA-derived fragment
agacagtcaaatttagcagtggag

SEQ ID NO: 27551 - DNA, 31 bp, Artificial Sequence
  synthetic circulating small noncoding RNA (sncRNA) 5' YRNA-derived fragment
aagccagtcaaatttagcagtggggtgttgt

SEQ ID NO: 27552 - DNA, 29 bp, Artificial Sequence
  synthetic circulating small noncoding RNA (sncRNA) 5' YRNA-derived fragment
ggctggtcccagtgcagtggtgtttacac

SEQ ID NO: 27553 - DNA, 30 bp, Artificial Sequence
  synthetic circulating small noncoding RNA (sncRNA) 5' YRNA-derived fragment
ggctagtcaagtgaagcagtgggagtgggg

SEQ ID NO: 27554 - DNA, 37 bp, Artificial Sequence
  synthetic circulating small noncoding RNA (sncRNA) 5' YRNA-derived fragment
ggctggtcctcgtgcagtggtgtttacaactaattga

SEQ ID NO: 27555 - DNA, 24 bp, Artificial Sequence
  synthetic circulating small noncoding RNA (sncRNA) 5' YRNA-derived fragment
ccccccacaaccacgcttgactag

SEQ ID NO: 27556 - DNA, 30 bp, Artificial Sequence
  synthetic circulating small noncoding RNA (sncRNA) 5' YRNA-derived fragment
ggcttgtccgagtgcagtggtgtttacaat

SEQ ID NO: 27557 - DNA, 24 bp, Artificial Sequence
  synthetic circulating small noncoding RNA (sncRNA) 5' YRNA-derived fragment
cccccctgctaaatttgactggct

SEQ ID NO: 27558 - DNA, 21 bp, Artificial Sequence
  synthetic circulating small noncoding RNA (sncRNA) 5' YRNA-derived fragment
gtccgagtgttgtgggttatt

SEQ ID NO: 27559 - DNA, 22 bp, Artificial Sequence
  synthetic circulating small noncoding RNA (sncRNA) 5' YRNA-derived fragment
cacagtcagttacagataaaac

SEQ ID NO: 27560 - DNA, 30 bp, Artificial Sequence
  synthetic circulating small noncoding RNA (sncRNA) 5' YRNA-derived fragment
ggctggtccaatggtagtcagttatctcaa

SEQ ID NO: 27561 - DNA, 22 bp, Artificial Sequence
  synthetic circulating small noncoding RNA (sncRNA) 5' YRNA-derived fragment
agccagtcagattttagcagtg

SEQ ID NO: 27562 - DNA, 24 bp, Artificial Sequence
  synthetic circulating small noncoding RNA (sncRNA) 5' YRNA-derived fragment
ctagtcgagtgcagtagtgagaag

SEQ ID NO: 27563 - DNA, 26 bp, Artificial Sequence
  synthetic circulating small noncoding RNA (sncRNA) 5' YRNA-derived fragment
gctagtcaagggaagcagtgggagtg

SEQ ID NO: 27564 - DNA, 26 bp, Artificial Sequence
  synthetic circulating small noncoding RNA (sncRNA) 5' YRNA-derived fragment
ggctggtctgaaggtagtgagttacc

SEQ ID NO: 27565 - DNA, 30 bp, Artificial Sequence
  synthetic circulating small noncoding RNA (sncRNA) 5' YRNA-derived fragment
gtggtccaatggtagtgggttatcagaact

SEQ ID NO: 27566 - DNA, 28 bp, Artificial Sequence
  synthetic circulating small noncoding RNA (sncRNA) 5' YRNA-derived fragment
aattgatcacaaccagttacatatttct

SEQ ID NO: 27567 - DNA, 30 bp, Artificial Sequence
  synthetic circulating small noncoding RNA (sncRNA) 5' YRNA-derived fragment
tttaagccagtaaaatttagcagtggggag

SEQ ID NO: 27568 - DNA, 23 bp, Artificial Sequence
  synthetic circulating small noncoding RNA (sncRNA) 5' YRNA-derived fragment
aagccagtcaaatttatcagagg

SEQ ID NO: 27569 - DNA, 24 bp, Artificial Sequence
  synthetic circulating small noncoding RNA (sncRNA) 5' YRNA-derived fragment
gactagtcaagtgaagcagtggga

SEQ ID NO: 27570 - DNA, 18 bp, Artificial Sequence
  synthetic circulating small noncoding RNA (sncRNA) 5' YRNA-derived fragment
cattagtgtaactaaagt

SEQ ID NO: 27571 - DNA, 26 bp, Artificial Sequence
  synthetic circulating small noncoding RNA (sncRNA) 5' YRNA-derived fragment
aggctagtcaagtgaagcagcaggag

SEQ ID NO: 27572 - DNA, 21 bp, Artificial Sequence
  synthetic circulating small noncoding RNA (sncRNA) 5' YRNA-derived fragment
ctagtcaagtgaagcagtggg

SEQ ID NO: 27573 - DNA, 30 bp, Artificial Sequence
  synthetic circulating small noncoding RNA (sncRNA) 5' YRNA-derived fragment
cgctggtccgagtgcagtggtgtttacaac

SEQ ID NO: 27574 - DNA, 24 bp, Artificial Sequence
  synthetic circulating small noncoding RNA (sncRNA) 5' YRNA-derived fragment
accagtcaagtgcagtagtgagaa

SEQ ID NO: 27575 - DNA, 23 bp, Artificial Sequence
  synthetic circulating small noncoding RNA (sncRNA) 5' YRNA-derived fragment
gttctgataaccccctaccatgg

SEQ ID NO: 27576 - DNA, 28 bp, Artificial Sequence
  synthetic circulating small noncoding RNA (sncRNA) 5' YRNA-derived fragment
tcccactgcttcacttgactagccttaa

SEQ ID NO: 27577 - DNA, 24 bp, Artificial Sequence
  synthetic circulating small noncoding RNA (sncRNA) 5' YRNA-derived fragment
taacccactaccattggaccaggc

SEQ ID NO: 27578 - DNA, 29 bp, Artificial Sequence
  synthetic circulating small noncoding RNA (sncRNA) 5' YRNA-derived fragment
tcgatataactcactaccttcggaccagc

SEQ ID NO: 27579 - DNA, 25 bp, Artificial Sequence
  synthetic circulating small noncoding RNA (sncRNA) 5' YRNA-derived fragment
aagacagtcaaatttagcagtggag

SEQ ID NO: 27580 - DNA, 27 bp, Artificial Sequence
  synthetic circulating small noncoding RNA (sncRNA) 5' YRNA-derived fragment
gtccgatggtagcgggttatcagaacc

SEQ ID NO: 27581 - DNA, 33 bp, Artificial Sequence
  synthetic circulating small noncoding RNA (sncRNA) 5' YRNA-derived fragment
agtagtgagaaggggggaaagagtagaacaagg

SEQ ID NO: 27582 - DNA, 36 bp, Artificial Sequence
  synthetic circulating small noncoding RNA (sncRNA) 5' YRNA-derived fragment
aatcaatggagataactcactaccttcagaccagcc

SEQ ID NO: 27583 - DNA, 35 bp, Artificial Sequence
  synthetic circulating small noncoding RNA (sncRNA) 5' YRNA-derived fragment
taagttctgataacccactactatcggaccagcca

SEQ ID NO: 27584 - DNA, 46 bp, Artificial Sequence
  synthetic circulating small noncoding RNA (sncRNA) 5' YRNA-derived fragment
agcagtgggagtggagaaggaacaaagaaatctgtaactggttgtg

SEQ ID NO: 27585 - DNA, 39 bp, Artificial Sequence
  synthetic circulating small noncoding RNA (sncRNA) 5' YRNA-derived fragment
ggctggtccgaatgtagtgagttatctcaattgattgtt

SEQ ID NO: 27586 - DNA, 31 bp, Artificial Sequence
  synthetic circulating small noncoding RNA (sncRNA) 5' YRNA-derived fragment
attgagataactcactgccttcagaccagcc

SEQ ID NO: 27587 - DNA, 18 bp, Artificial Sequence
  synthetic circulating small noncoding RNA (sncRNA) 5' YRNA-derived fragment
cgctaccttaggaccagc

SEQ ID NO: 27588 - DNA, 30 bp, Artificial Sequence
  synthetic circulating small noncoding RNA (sncRNA) 5' YRNA-derived fragment
ttgaaataattcactaccttcagaccagct

SEQ ID NO: 27589 - DNA, 24 bp, Artificial Sequence
  synthetic circulating small noncoding RNA (sncRNA) 5' YRNA-derived fragment
ccacaactaaatttgactggcttt

SEQ ID NO: 27590 - DNA, 23 bp, Artificial Sequence
  synthetic circulating small noncoding RNA (sncRNA) 5' YRNA-derived fragment
gactagtcaagtgaagcagtggg

SEQ ID NO: 27591 - DNA, 23 bp, Artificial Sequence
  synthetic circulating small noncoding RNA (sncRNA) 5' YRNA-derived fragment
aaaagccagtcaaatttagcagt

SEQ ID NO: 27592 - DNA, 34 bp, Artificial Sequence
  synthetic circulating small noncoding RNA (sncRNA) 5' YRNA-derived fragment
tataccacctcccactgctaaatttgactggctt

SEQ ID NO: 27593 - DNA, 18 bp, Artificial Sequence
  synthetic circulating small noncoding RNA (sncRNA) 5' YRNA-derived fragment
gggtgttccgaaggtagt

SEQ ID NO: 27594 - DNA, 42 bp, Artificial Sequence
  synthetic circulating small noncoding RNA (sncRNA) 5' YRNA-derived fragment
aaggccagtcaagtgaagcagtgggagtggagaaggaacaaa

SEQ ID NO: 27595 - DNA, 29 bp, Artificial Sequence
  synthetic circulating small noncoding RNA (sncRNA) 5' YRNA-derived fragment
ctctcccactgcttcacttgaccagcctt

SEQ ID NO: 27596 - DNA, 28 bp, Artificial Sequence
  synthetic circulating small noncoding RNA (sncRNA) 5' YRNA-derived fragment
tggtagtgggttatcagaacttattaac

SEQ ID NO: 27597 - DNA, 23 bp, Artificial Sequence
  synthetic circulating small noncoding RNA (sncRNA) 5' YRNA-derived fragment
ctgataacccactaccatcggac

SEQ ID NO: 27598 - DNA, 38 bp, Artificial Sequence
  synthetic circulating small noncoding RNA (sncRNA) 5' YRNA-derived fragment
tccttctccactcccactgcttcacttgactagccttt

SEQ ID NO: 27599 - DNA, 25 bp, Artificial Sequence
  synthetic circulating small noncoding RNA (sncRNA) 5' YRNA-derived fragment
ggctggtctgagggcagtggtgttt

SEQ ID NO: 27600 - DNA, 31 bp, Artificial Sequence
  synthetic circulating small noncoding RNA (sncRNA) 5' YRNA-derived fragment
attgaaataactcactacccttggaccaacc

SEQ ID NO: 27601 - DNA, 33 bp, Artificial Sequence
  synthetic circulating small noncoding RNA (sncRNA) 5' YRNA-derived fragment
cttctccactcccactgcttcacttgactagcc

SEQ ID NO: 27602 - DNA, 22 bp, Artificial Sequence
  synthetic circulating small noncoding RNA (sncRNA) 5' YRNA-derived fragment
cagtcaaatttagcagtagggg

SEQ ID NO: 27603 - DNA, 23 bp, Artificial Sequence
  synthetic circulating small noncoding RNA (sncRNA) 5' YRNA-derived fragment
ttctcactactgtacttgactag

SEQ ID NO: 27604 - DNA, 22 bp, Artificial Sequence
  synthetic circulating small noncoding RNA (sncRNA) 5' YRNA-derived fragment
tagtcaaatttagcagtggggg

SEQ ID NO: 27605 - DNA, 23 bp, Artificial Sequence
  synthetic circulating small noncoding RNA (sncRNA) 5' YRNA-derived fragment
actgctaaatttgactggcttta

SEQ ID NO: 27606 - DNA, 39 bp, Artificial Sequence
  synthetic circulating small noncoding RNA (sncRNA) 5' YRNA-derived fragment
gttaataagttctgataacccactaccattggaccaacc

SEQ ID NO: 27607 - DNA, 18 bp, Artificial Sequence
  synthetic circulating small noncoding RNA (sncRNA) 5' YRNA-derived fragment
ctttggtctgtaactgac

SEQ ID NO: 27608 - DNA, 32 bp, Artificial Sequence
  synthetic circulating small noncoding RNA (sncRNA) 5' YRNA-derived fragment
tctccactcccactgcttcacttgactagact

SEQ ID NO: 27609 - DNA, 20 bp, Artificial Sequence
  synthetic circulating small noncoding RNA (sncRNA) 5' YRNA-derived fragment
atttctgataacccactacc

SEQ ID NO: 27610 - DNA, 26 bp, Artificial Sequence
  synthetic circulating small noncoding RNA (sncRNA) 5' YRNA-derived fragment
ttccgatggtagtgggttatctgaac

SEQ ID NO: 27611 - DNA, 30 bp, Artificial Sequence
  synthetic circulating small noncoding RNA (sncRNA) 5' YRNA-derived fragment
ttgagataactcactacattcgcactggcc

SEQ ID NO: 27612 - DNA, 22 bp, Artificial Sequence
  synthetic circulating small noncoding RNA (sncRNA) 5' YRNA-derived fragment
cacccactcctaaatttgcctg

SEQ ID NO: 27613 - DNA, 45 bp, Artificial Sequence
  synthetic circulating small noncoding RNA (sncRNA) 5' YRNA-derived fragment
aggctagtcaagtgaagcagtgggagtggagaaggaacaaagaag

SEQ ID NO: 27614 - DNA, 23 bp, Artificial Sequence
  synthetic circulating small noncoding RNA (sncRNA) 5' YRNA-derived fragment
gtagtgggttatcaggacttatt

SEQ ID NO: 27615 - DNA, 24 bp, Artificial Sequence
  synthetic circulating small noncoding RNA (sncRNA) 5' YRNA-derived fragment
ccccaactgctaaatttgactggc

SEQ ID NO: 27616 - DNA, 38 bp, Artificial Sequence
  synthetic circulating small noncoding RNA (sncRNA) 5' YRNA-derived fragment
ggctagtcaagtgaagcagtgggagtggagaaggaaga

SEQ ID NO: 27617 - DNA, 34 bp, Artificial Sequence
  synthetic circulating small noncoding RNA (sncRNA) 5' YRNA-derived fragment
aagttctgataacccactaccatcggaccagtcc

SEQ ID NO: 27618 - DNA, 28 bp, Artificial Sequence
  synthetic circulating small noncoding RNA (sncRNA) 5' YRNA-derived fragment
tggtcagatggtagtgggttatcagaac

SEQ ID NO: 27619 - DNA, 23 bp, Artificial Sequence
  synthetic circulating small noncoding RNA (sncRNA) 5' YRNA-derived fragment
ttcccactgcttcacttgactag

SEQ ID NO: 27620 - DNA, 20 bp, Artificial Sequence
  synthetic circulating small noncoding RNA (sncRNA) 5' YRNA-derived fragment
gctagtcaaatttagcagtg

SEQ ID NO: 27621 - DNA, 21 bp, Artificial Sequence
  synthetic circulating small noncoding RNA (sncRNA) 5' YRNA-derived fragment
aagtcaagtgaagcagtggga

SEQ ID NO: 27622 - DNA, 28 bp, Artificial Sequence
  synthetic circulating small noncoding RNA (sncRNA) 5' YRNA-derived fragment
taagttctgataacccactaccatcgaa

SEQ ID NO: 27623 - DNA, 22 bp, Artificial Sequence
  synthetic circulating small noncoding RNA (sncRNA) 5' YRNA-derived fragment
ctcccactgctaaatttgactg

SEQ ID NO: 27624 - DNA, 38 bp, Artificial Sequence
  synthetic circulating small noncoding RNA (sncRNA) 5' YRNA-derived fragment
aatgttaataagttctgataacccactaccatcggacc

SEQ ID NO: 27625 - DNA, 25 bp, Artificial Sequence
  synthetic circulating small noncoding RNA (sncRNA) 5' YRNA-derived fragment
gcccgctgcttcacttgactagcct

SEQ ID NO: 27626 - DNA, 20 bp, Artificial Sequence
  synthetic circulating small noncoding RNA (sncRNA) 5' YRNA-derived fragment
tcccgctgcttcacttgact

SEQ ID NO: 27627 - DNA, 33 bp, Artificial Sequence
  synthetic circulating small noncoding RNA (sncRNA) 5' YRNA-derived fragment
tgagttctgataacccactaccatcggaccagc

SEQ ID NO: 27628 - DNA, 25 bp, Artificial Sequence
  synthetic circulating small noncoding RNA (sncRNA) 5' YRNA-derived fragment
aggagttcgatctgtaactgactgt

SEQ ID NO: 27629 - DNA, 40 bp, Artificial Sequence
  synthetic circulating small noncoding RNA (sncRNA) 5' YRNA-derived fragment
ggctggtccaatgatagtgggttatcagaacttattaaca

SEQ ID NO: 27630 - DNA, 39 bp, Artificial Sequence
  synthetic circulating small noncoding RNA (sncRNA) 5' YRNA-derived fragment
gctagtcaagtgaagcagtgggagtggagaaggaacaaa

SEQ ID NO: 27631 - DNA, 28 bp, Artificial Sequence
  synthetic circulating small noncoding RNA (sncRNA) 5' YRNA-derived fragment
cactgccactgcttcacctgactagcct

SEQ ID NO: 27632 - DNA, 18 bp, Artificial Sequence
  synthetic circulating small noncoding RNA (sncRNA) 5' YRNA-derived fragment
cactaccatcggaccagc

SEQ ID NO: 27633 - DNA, 25 bp, Artificial Sequence
  synthetic circulating small noncoding RNA (sncRNA) 5' YRNA-derived fragment
ttctcactactgcacttgactagac

SEQ ID NO: 27634 - DNA, 29 bp, Artificial Sequence
  synthetic circulating small noncoding RNA (sncRNA) 5' YRNA-derived fragment
aaaaggcagtcaaatttagcagtgtgggg

SEQ ID NO: 27635 - DNA, 33 bp, Artificial Sequence
  synthetic circulating small noncoding RNA (sncRNA) 5' YRNA-derived fragment
ttctccactcccactgcttcgcttgactagcct

SEQ ID NO: 27636 - DNA, 30 bp, Artificial Sequence
  synthetic circulating small noncoding RNA (sncRNA) 5' YRNA-derived fragment
taaggctagtcaagtgaagcagtggaagtg

SEQ ID NO: 27637 - DNA, 24 bp, Artificial Sequence
  synthetic circulating small noncoding RNA (sncRNA) 5' YRNA-derived fragment
taccaacgttagtgacactaatgt

SEQ ID NO: 27638 - DNA, 24 bp, Artificial Sequence
  synthetic circulating small noncoding RNA (sncRNA) 5' YRNA-derived fragment
ctcccactgcttcacttgactaac

SEQ ID NO: 27639 - DNA, 27 bp, Artificial Sequence
  synthetic circulating small noncoding RNA (sncRNA) 5' YRNA-derived fragment
agctagtcaagtgaagcagtgggagtg

SEQ ID NO: 27640 - DNA, 40 bp, Artificial Sequence
  synthetic circulating small noncoding RNA (sncRNA) 5' YRNA-derived fragment
aagccattcaaatttagcagtggggggttgtatacgaact

SEQ ID NO: 27641 - DNA, 29 bp, Artificial Sequence
  synthetic circulating small noncoding RNA (sncRNA) 5' YRNA-derived fragment
cccccaactgctaaatttgactggcttta

SEQ ID NO: 27642 - DNA, 46 bp, Artificial Sequence
  synthetic circulating small noncoding RNA (sncRNA) 5' YRNA-derived fragment
aaccagtcaaatttagcagtggggggttgtataccaactttaatga

SEQ ID NO: 27643 - DNA, 30 bp, Artificial Sequence
  synthetic circulating small noncoding RNA (sncRNA) 5' YRNA-derived fragment
gttttgataacccactaccatcagaccagc

SEQ ID NO: 27644 - DNA, 39 bp, Artificial Sequence
  synthetic circulating small noncoding RNA (sncRNA) 5' YRNA-derived fragment
ggctggtctgaaggtagtgagttatctcaattgattgtt

SEQ ID NO: 27645 - DNA, 23 bp, Artificial Sequence
  synthetic circulating small noncoding RNA (sncRNA) 5' YRNA-derived fragment
ggctggtccgaaggtggtgagtt

SEQ ID NO: 27646 - DNA, 29 bp, Artificial Sequence
  synthetic circulating small noncoding RNA (sncRNA) 5' YRNA-derived fragment
tctgataacccactaccattggaccagcc

SEQ ID NO: 27647 - DNA, 30 bp, Artificial Sequence
  synthetic circulating small noncoding RNA (sncRNA) 5' YRNA-derived fragment
ttgaggtaactcactaccttagggccagca

SEQ ID NO: 27648 - DNA, 27 bp, Artificial Sequence
  synthetic circulating small noncoding RNA (sncRNA) 5' YRNA-derived fragment
ctcccactacttcacttgactagcctt

SEQ ID NO: 27649 - DNA, 26 bp, Artificial Sequence
  synthetic circulating small noncoding RNA (sncRNA) 5' YRNA-derived fragment
actcccactgcttcacttgactagac

SEQ ID NO: 27650 - DNA, 19 bp, Artificial Sequence
  synthetic circulating small noncoding RNA (sncRNA) 5' YRNA-derived fragment
atcttagtgacactaatgt

SEQ ID NO: 27651 - DNA, 33 bp, Artificial Sequence
  synthetic circulating small noncoding RNA (sncRNA) 5' YRNA-derived fragment
ttctccactcccactggttcacttgagtagcct

SEQ ID NO: 27652 - DNA, 25 bp, Artificial Sequence
  synthetic circulating small noncoding RNA (sncRNA) 5' YRNA-derived fragment
tcccactgcgtcacttgattagcct

SEQ ID NO: 27653 - DNA, 29 bp, Artificial Sequence
  synthetic circulating small noncoding RNA (sncRNA) 5' YRNA-derived fragment
ataagactagtcaagtgcagtagtgagaa

SEQ ID NO: 27654 - DNA, 24 bp, Artificial Sequence
  synthetic circulating small noncoding RNA (sncRNA) 5' YRNA-derived fragment
cgaaggtagtgagttatctcaatt

SEQ ID NO: 27655 - DNA, 27 bp, Artificial Sequence
  synthetic circulating small noncoding RNA (sncRNA) 5' YRNA-derived fragment
ttctcactactgcatttgactagtctt

SEQ ID NO: 27656 - DNA, 22 bp, Artificial Sequence
  synthetic circulating small noncoding RNA (sncRNA) 5' YRNA-derived fragment
ctagtcaagtgcaggagtgaga

SEQ ID NO: 27657 - DNA, 23 bp, Artificial Sequence
  synthetic circulating small noncoding RNA (sncRNA) 5' YRNA-derived fragment
ctcccagtgattcacttgactag

SEQ ID NO: 27658 - DNA, 29 bp, Artificial Sequence
  synthetic circulating small noncoding RNA (sncRNA) 5' YRNA-derived fragment
agttctgataacccactaccatcagacta

SEQ ID NO: 27659 - DNA, 20 bp, Artificial Sequence
  synthetic circulating small noncoding RNA (sncRNA) 5' YRNA-derived fragment
ttatagactgaaccccttgc

SEQ ID NO: 27660 - DNA, 22 bp, Artificial Sequence
  synthetic circulating small noncoding RNA (sncRNA) 5' YRNA-derived fragment
agccaaatttcgcagtgggggg

SEQ ID NO: 27661 - DNA, 20 bp, Artificial Sequence
  synthetic circulating small noncoding RNA (sncRNA) 5' YRNA-derived fragment
taaagccagtcaaatttagc

SEQ ID NO: 27662 - DNA, 31 bp, Artificial Sequence
  synthetic circulating small noncoding RNA (sncRNA) 5' YRNA-derived fragment
ggcggatccaaaggtagtgagttatctcaat

SEQ ID NO: 27663 - DNA, 35 bp, Artificial Sequence
  synthetic circulating small noncoding RNA (sncRNA) 5' YRNA-derived fragment
atacaaccccccactgctaaatttgactggctttt

SEQ ID NO: 27664 - DNA, 24 bp, Artificial Sequence
  synthetic circulating small noncoding RNA (sncRNA) 5' YRNA-derived fragment
tgctggtccgagtgcagtggtgtt

SEQ ID NO: 27665 - DNA, 26 bp, Artificial Sequence
  synthetic circulating small noncoding RNA (sncRNA) 5' YRNA-derived fragment
gttctgatgacccactaccatcggac

SEQ ID NO: 27666 - DNA, 33 bp, Artificial Sequence
  synthetic circulating small noncoding RNA (sncRNA) 5' YRNA-derived fragment
gctagtcaagtgaagcagtgggagtggagaagg

SEQ ID NO: 27667 - DNA, 26 bp, Artificial Sequence
  synthetic circulating small noncoding RNA (sncRNA) 5' YRNA-derived fragment
aaggcagtcaaatttagcagtgtggg

SEQ ID NO: 27668 - DNA, 41 bp, Artificial Sequence
  synthetic circulating small noncoding RNA (sncRNA) 5' YRNA-derived fragment
agactagtcaagtgcagtagtgagaaggggggaaagagtag

SEQ ID NO: 27669 - DNA, 18 bp, Artificial Sequence
  synthetic circulating small noncoding RNA (sncRNA) 5' YRNA-derived fragment
actacctttggacaagcc

SEQ ID NO: 27670 - DNA, 30 bp, Artificial Sequence
  synthetic circulating small noncoding RNA (sncRNA) 5' YRNA-derived fragment
gttgtcaacaccactgcactcggaccagcc

SEQ ID NO: 27671 - DNA, 36 bp, Artificial Sequence
  synthetic circulating small noncoding RNA (sncRNA) 5' YRNA-derived fragment
aatcaattgagataacccactaccttcggacgagcc

SEQ ID NO: 27672 - DNA, 27 bp, Artificial Sequence
  synthetic circulating small noncoding RNA (sncRNA) 5' YRNA-derived fragment
tccgatggtagtgggttatctgaactt

SEQ ID NO: 27673 - DNA, 29 bp, Artificial Sequence
  synthetic circulating small noncoding RNA (sncRNA) 5' YRNA-derived fragment
cccccttctcactactgcacttgactagt

SEQ ID NO: 27674 - DNA, 24 bp, Artificial Sequence
  synthetic circulating small noncoding RNA (sncRNA) 5' YRNA-derived fragment
gtagtcaagtgcagtagtgagaag

SEQ ID NO: 27675 - DNA, 26 bp, Artificial Sequence
  synthetic circulating small noncoding RNA (sncRNA) 5' YRNA-derived fragment
ctccccactgctaaatttgactaact

SEQ ID NO: 27676 - DNA, 30 bp, Artificial Sequence
  synthetic circulating small noncoding RNA (sncRNA) 5' YRNA-derived fragment
attgagataactcactacctttggaccaac

SEQ ID NO: 27677 - DNA, 22 bp, Artificial Sequence
  synthetic circulating small noncoding RNA (sncRNA) 5' YRNA-derived fragment
gtcagattttagcagtgggggg

SEQ ID NO: 27678 - DNA, 28 bp, Artificial Sequence
  synthetic circulating small noncoding RNA (sncRNA) 5' YRNA-derived fragment
gagataactcactacctttggacaagcc

SEQ ID NO: 27679 - DNA, 23 bp, Artificial Sequence
  synthetic circulating small noncoding RNA (sncRNA) 5' YRNA-derived fragment
gatggtagtgggttaccagaact

SEQ ID NO: 27680 - DNA, 30 bp, Artificial Sequence
  synthetic circulating small noncoding RNA (sncRNA) 5' YRNA-derived fragment
tgtctgatggtagtgggttatcagaactta

SEQ ID NO: 27681 - DNA, 36 bp, Artificial Sequence
  synthetic circulating small noncoding RNA (sncRNA) 5' YRNA-derived fragment
agctggttcgatggcagtgggttatcagaacttatt

SEQ ID NO: 27682 - DNA, 45 bp, Artificial Sequence
  synthetic circulating small noncoding RNA (sncRNA) 5' YRNA-derived fragment
ggctggtccgatggtagtgggttatcagaacttattaacatttgt

SEQ ID NO: 27683 - DNA, 21 bp, Artificial Sequence
  synthetic circulating small noncoding RNA (sncRNA) 5' YRNA-derived fragment
agccattcaaatttagcagtg

SEQ ID NO: 27684 - DNA, 23 bp, Artificial Sequence
  synthetic circulating small noncoding RNA (sncRNA) 5' YRNA-derived fragment
ctagtcaagtgcagtagtaaggc

SEQ ID NO: 27685 - DNA, 33 bp, Artificial Sequence
  synthetic circulating small noncoding RNA (sncRNA) 5' YRNA-derived fragment
aagttctgagaacccaataccatcagaccagct

SEQ ID NO: 27686 - DNA, 29 bp, Artificial Sequence
  synthetic circulating small noncoding RNA (sncRNA) 5' YRNA-derived fragment
ggtctgatggtagtgggttatcagagctt

SEQ ID NO: 27687 - DNA, 24 bp, Artificial Sequence
  synthetic circulating small noncoding RNA (sncRNA) 5' YRNA-derived fragment
caggctagtcaagtgaagcagtgg

SEQ ID NO: 27688 - DNA, 31 bp, Artificial Sequence
  synthetic circulating small noncoding RNA (sncRNA) 5' YRNA-derived fragment
gttctgataacacactgccatgggcccagcc

SEQ ID NO: 27689 - DNA, 24 bp, Artificial Sequence
  synthetic circulating small noncoding RNA (sncRNA) 5' YRNA-derived fragment
ggcttgtccgagtgcagtggtgtt

SEQ ID NO: 27690 - DNA, 18 bp, Artificial Sequence
  synthetic circulating small noncoding RNA (sncRNA) 5' YRNA-derived fragment
ctgcttcacttcactagc

SEQ ID NO: 27691 - DNA, 26 bp, Artificial Sequence
  synthetic circulating small noncoding RNA (sncRNA) 5' YRNA-derived fragment
ttctcactactgcacttgactagact

SEQ ID NO: 27692 - DNA, 36 bp, Artificial Sequence
  synthetic circulating small noncoding RNA (sncRNA) 5' YRNA-derived fragment
gccttctccactcccactgcttcacttgactaacct

SEQ ID NO: 27693 - DNA, 35 bp, Artificial Sequence
  synthetic circulating small noncoding RNA (sncRNA) 5' YRNA-derived fragment
ggctggtctgaaggtagtgagttatctcaattgtt

SEQ ID NO: 27694 - DNA, 29 bp, Artificial Sequence
  synthetic circulating small noncoding RNA (sncRNA) 5' YRNA-derived fragment
taacaataacccacaacactcagaccaac

SEQ ID NO: 27695 - DNA, 24 bp, Artificial Sequence
  synthetic circulating small noncoding RNA (sncRNA) 5' YRNA-derived fragment
cgcccgctgcttcacttgactagc

SEQ ID NO: 27696 - DNA, 19 bp, Artificial Sequence
  synthetic circulating small noncoding RNA (sncRNA) 5' YRNA-derived fragment
aagttctgataacccacca

SEQ ID NO: 27697 - DNA, 36 bp, Artificial Sequence
  synthetic circulating small noncoding RNA (sncRNA) 5' YRNA-derived fragment
gggtggtccaatggtagtgggttatcagaacttatt

SEQ ID NO: 27698 - DNA, 19 bp, Artificial Sequence
  synthetic circulating small noncoding RNA (sncRNA) 5' YRNA-derived fragment
gttctgagaacccaatacc

SEQ ID NO: 27699 - DNA, 25 bp, Artificial Sequence
  synthetic circulating small noncoding RNA (sncRNA) 5' YRNA-derived fragment
ctgatggtagtgggttatcaggact

SEQ ID NO: 27700 - DNA, 25 bp, Artificial Sequence
  synthetic circulating small noncoding RNA (sncRNA) 5' YRNA-derived fragment
caacaccactgcactcggaccagcc

SEQ ID NO: 27701 - DNA, 21 bp, Artificial Sequence
  synthetic circulating small noncoding RNA (sncRNA) 5' YRNA-derived fragment
tgtctcactactgcacttgac

SEQ ID NO: 27702 - DNA, 20 bp, Artificial Sequence
  synthetic circulating small noncoding RNA (sncRNA) 5' YRNA-derived fragment
caaccgcgcttgactagctt

SEQ ID NO: 27703 - DNA, 31 bp, Artificial Sequence
  synthetic circulating small noncoding RNA (sncRNA) 5' YRNA-derived fragment
gttctgatagcccactaccatcaaaccagcc

SEQ ID NO: 27704 - DNA, 28 bp, Artificial Sequence
  synthetic circulating small noncoding RNA (sncRNA) 5' YRNA-derived fragment
aggccagtcaagtgaagcagtgggagtg

SEQ ID NO: 27705 - DNA, 27 bp, Artificial Sequence
  synthetic circulating small noncoding RNA (sncRNA) 5' YRNA-derived fragment
cttctcactgctgcacttgactagtct

SEQ ID NO: 27706 - DNA, 31 bp, Artificial Sequence
  synthetic circulating small noncoding RNA (sncRNA) 5' YRNA-derived fragment
attgagataacacactacctttggaccagcc

SEQ ID NO: 27707 - DNA, 24 bp, Artificial Sequence
  synthetic circulating small noncoding RNA (sncRNA) 5' YRNA-derived fragment
ggctggtcagatggtagtgggtta

SEQ ID NO: 27708 - DNA, 28 bp, Artificial Sequence
  synthetic circulating small noncoding RNA (sncRNA) 5' YRNA-derived fragment
aagactactcaagtgcagtagtgagaag

SEQ ID NO: 27709 - DNA, 31 bp, Artificial Sequence
  synthetic circulating small noncoding RNA (sncRNA) 5' YRNA-derived fragment
gtcctatggtagtgggttatcagaacttatt

SEQ ID NO: 27710 - DNA, 21 bp, Artificial Sequence
  synthetic circulating small noncoding RNA (sncRNA) 5' YRNA-derived fragment
gataacccactaccatcggac

SEQ ID NO: 27711 - DNA, 31 bp, Artificial Sequence
  synthetic circulating small noncoding RNA (sncRNA) 5' YRNA-derived fragment
agttctgataacccactaccattgggccagc

SEQ ID NO: 27712 - DNA, 34 bp, Artificial Sequence
  synthetic circulating small noncoding RNA (sncRNA) 5' YRNA-derived fragment
ttaagccagtaaaatttagcagtggggagttgta

SEQ ID NO: 27713 - DNA, 27 bp, Artificial Sequence
  synthetic circulating small noncoding RNA (sncRNA) 5' YRNA-derived fragment
ggcttttccgatggtagtgggttatct

SEQ ID NO: 27714 - DNA, 29 bp, Artificial Sequence
  synthetic circulating small noncoding RNA (sncRNA) 5' YRNA-derived fragment
ggctggtacaatggtagtgggttatcaga

SEQ ID NO: 27715 - DNA, 29 bp, Artificial Sequence
  synthetic circulating small noncoding RNA (sncRNA) 5' YRNA-derived fragment
aacaataacccagcaccctcagaccaact

SEQ ID NO: 27716 - DNA, 21 bp, Artificial Sequence
  synthetic circulating small noncoding RNA (sncRNA) 5' YRNA-derived fragment
ttcagataactcactaccttc

SEQ ID NO: 27717 - DNA, 24 bp, Artificial Sequence
  synthetic circulating small noncoding RNA (sncRNA) 5' YRNA-derived fragment
ctagtcaagcgtggttgtgggggg

SEQ ID NO: 27718 - DNA, 39 bp, Artificial Sequence
  synthetic circulating small noncoding RNA (sncRNA) 5' YRNA-derived fragment
ggagaaggaacaaagaaatctgtaactggttgtgatcaa

SEQ ID NO: 27719 - DNA, 26 bp, Artificial Sequence
  synthetic circulating small noncoding RNA (sncRNA) 5' YRNA-derived fragment
cataaaccactgcactcggaccagcc

SEQ ID NO: 27720 - DNA, 24 bp, Artificial Sequence
  synthetic circulating small noncoding RNA (sncRNA) 5' YRNA-derived fragment
ttgttccttctccactcccactgc

SEQ ID NO: 27721 - DNA, 23 bp, Artificial Sequence
  synthetic circulating small noncoding RNA (sncRNA) 5' YRNA-derived fragment
ggctggtccaatggtagtggttt

SEQ ID NO: 27722 - DNA, 31 bp, Artificial Sequence
  synthetic circulating small noncoding RNA (sncRNA) 5' YRNA-derived fragment
aggtagtgagttatctcaattgattgttcac

SEQ ID NO: 27723 - DNA, 25 bp, Artificial Sequence
  synthetic circulating small noncoding RNA (sncRNA) 5' YRNA-derived fragment
gagtagaacaaggagttcgatctgt

SEQ ID NO: 27724 - DNA, 43 bp, Artificial Sequence
  synthetic circulating small noncoding RNA (sncRNA) 5' YRNA-derived fragment
aagactagtcaagtgcagtagtgagaaggggggaaagagtaga

SEQ ID NO: 27725 - DNA, 20 bp, Artificial Sequence
  synthetic circulating small noncoding RNA (sncRNA) 5' YRNA-derived fragment
ggctagtctgatggtagtgg

SEQ ID NO: 27726 - DNA, 29 bp, Artificial Sequence
  synthetic circulating small noncoding RNA (sncRNA) 5' YRNA-derived fragment
ttgtaaacaccactgcactaggaccagac

SEQ ID NO: 27727 - DNA, 33 bp, Artificial Sequence
  synthetic circulating small noncoding RNA (sncRNA) 5' YRNA-derived fragment
tggctggtctgatggtagtgggttatcagaact

SEQ ID NO: 27728 - DNA, 26 bp, Artificial Sequence
  synthetic circulating small noncoding RNA (sncRNA) 5' YRNA-derived fragment
agactagtcaagtgcattagtgagga

SEQ ID NO: 27729 - DNA, 24 bp, Artificial Sequence
  synthetic circulating small noncoding RNA (sncRNA) 5' YRNA-derived fragment
ggtccgagtgttgtgggttattgt

SEQ ID NO: 27730 - DNA, 24 bp, Artificial Sequence
  synthetic circulating small noncoding RNA (sncRNA) 5' YRNA-derived fragment
tcccactgcttcacttggctagcc

SEQ ID NO: 27731 - DNA, 33 bp, Artificial Sequence
  synthetic circulating small noncoding RNA (sncRNA) 5' YRNA-derived fragment
ttctccacttccactgcttcacttgactagcct

SEQ ID NO: 27732 - DNA, 30 bp, Artificial Sequence
  synthetic circulating small noncoding RNA (sncRNA) 5' YRNA-derived fragment
ctggtctgatggtagtgggttatcagaact

SEQ ID NO: 27733 - DNA, 22 bp, Artificial Sequence
  synthetic circulating small noncoding RNA (sncRNA) 5' YRNA-derived fragment
aagccattcaaatttagcagtg

SEQ ID NO: 27734 - DNA, 24 bp, Artificial Sequence
  synthetic circulating small noncoding RNA (sncRNA) 5' YRNA-derived fragment
acaccactgcactcagaccagcag

SEQ ID NO: 27735 - DNA, 23 bp, Artificial Sequence
  synthetic circulating small noncoding RNA (sncRNA) 5' YRNA-derived fragment
aagacagtcaaatttagcagtgg

SEQ ID NO: 27736 - DNA, 38 bp, Artificial Sequence
  synthetic circulating small noncoding RNA (sncRNA) 5' YRNA-derived fragment
ctagtcaagtgtagtagtgagaaggtgggaaagagtag

SEQ ID NO: 27737 - DNA, 45 bp, Artificial Sequence
  synthetic circulating small noncoding RNA (sncRNA) 5' YRNA-derived fragment
aagctagtcaaatttagcagtggggggttatataccaactttagt

SEQ ID NO: 27738 - DNA, 23 bp, Artificial Sequence
  synthetic circulating small noncoding RNA (sncRNA) 5' YRNA-derived fragment
gtgagttatctcaattgattgtt

SEQ ID NO: 27739 - DNA, 22 bp, Artificial Sequence
  synthetic circulating small noncoding RNA (sncRNA) 5' YRNA-derived fragment
gtagtgggttatcagaacttat

SEQ ID NO: 27740 - DNA, 32 bp, Artificial Sequence
  synthetic circulating small noncoding RNA (sncRNA) 5' YRNA-derived fragment
tggctggtctgatggtagtgggttatcagaac

SEQ ID NO: 27741 - DNA, 29 bp, Artificial Sequence
  synthetic circulating small noncoding RNA (sncRNA) 5' YRNA-derived fragment
aagttctgataacccactactatcggacc

SEQ ID NO: 27742 - DNA, 26 bp, Artificial Sequence
  synthetic circulating small noncoding RNA (sncRNA) 5' YRNA-derived fragment
agctagtcaaatttagcagtggggac

SEQ ID NO: 27743 - DNA, 21 bp, Artificial Sequence
  synthetic circulating small noncoding RNA (sncRNA) 5' YRNA-derived fragment
ccagtcaaatttagcagtggg

SEQ ID NO: 27744 - DNA, 24 bp, Artificial Sequence
  synthetic circulating small noncoding RNA (sncRNA) 5' YRNA-derived fragment
gccagtcagattttagcagtgggg

SEQ ID NO: 27745 - DNA, 27 bp, Artificial Sequence
  synthetic circulating small noncoding RNA (sncRNA) 5' YRNA-derived fragment
tactagtcaagtgaaacagtgggagtg

SEQ ID NO: 27746 - DNA, 26 bp, Artificial Sequence
  synthetic circulating small noncoding RNA (sncRNA) 5' YRNA-derived fragment
ctagtcaagggaagcagtgggagtgg

SEQ ID NO: 27747 - DNA, 20 bp, Artificial Sequence
  synthetic circulating small noncoding RNA (sncRNA) 5' YRNA-derived fragment
ctgataacccactaccatcg

SEQ ID NO: 27748 - DNA, 32 bp, Artificial Sequence
  synthetic circulating small noncoding RNA (sncRNA) 5' YRNA-derived fragment
ctccgctcccactgctttacttgactagcctt

SEQ ID NO: 27749 - DNA, 39 bp, Artificial Sequence
  synthetic circulating small noncoding RNA (sncRNA) 5' YRNA-derived fragment
actagtcaagtgtagtagtgagaaggtgggaaagagtag

SEQ ID NO: 27750 - DNA, 32 bp, Artificial Sequence
  synthetic circulating small noncoding RNA (sncRNA) 5' YRNA-derived fragment
gctagtcaaatgaagcagtgggaggggagaag

SEQ ID NO: 27751 - DNA, 20 bp, Artificial Sequence
  synthetic circulating small noncoding RNA (sncRNA) 5' YRNA-derived fragment
ctgctaaatttggctggctt

SEQ ID NO: 27752 - DNA, 28 bp, Artificial Sequence
  synthetic circulating small noncoding RNA (sncRNA) 5' YRNA-derived fragment
ttctcactactgcacttgactagtcttc

SEQ ID NO: 27753 - DNA, 21 bp, Artificial Sequence
  synthetic circulating small noncoding RNA (sncRNA) 5' YRNA-derived fragment
ccccccactgctaaatttggc

SEQ ID NO: 27754 - DNA, 23 bp, Artificial Sequence
  synthetic circulating small noncoding RNA (sncRNA) 5' YRNA-derived fragment
caatggtagtggtttatcagaac

SEQ ID NO: 27755 - DNA, 21 bp, Artificial Sequence
  synthetic circulating small noncoding RNA (sncRNA) 5' YRNA-derived fragment
aagccagtcaaggttagcagt

SEQ ID NO: 27756 - DNA, 22 bp, Artificial Sequence
  synthetic circulating small noncoding RNA (sncRNA) 5' YRNA-derived fragment
ctagtcaagtgaagcaatggga

SEQ ID NO: 27757 - DNA, 24 bp, Artificial Sequence
  synthetic circulating small noncoding RNA (sncRNA) 5' YRNA-derived fragment
gatagtagtgggttatcagaacac

SEQ ID NO: 27758 - DNA, 23 bp, Artificial Sequence
  synthetic circulating small noncoding RNA (sncRNA) 5' YRNA-derived fragment
ggctggtccgatggtagtgattt

SEQ ID NO: 27759 - DNA, 26 bp, Artificial Sequence
  synthetic circulating small noncoding RNA (sncRNA) 5' YRNA-derived fragment
ggctggtctgaaagtagtgagttatc

SEQ ID NO: 27760 - DNA, 41 bp, Artificial Sequence
  synthetic circulating small noncoding RNA (sncRNA) 5' YRNA-derived fragment
gagtagaacaaggagttcgatctgtaactgactgtgaacaa

SEQ ID NO: 27761 - DNA, 39 bp, Artificial Sequence
  synthetic circulating small noncoding RNA (sncRNA) 5' YRNA-derived fragment
tgttaataagttctgataacccactaccattggaccacc

SEQ ID NO: 27762 - DNA, 26 bp, Artificial Sequence
  synthetic circulating small noncoding RNA (sncRNA) 5' YRNA-derived fragment
aaggctagccaactgaagcagtggga

SEQ ID NO: 27763 - DNA, 30 bp, Artificial Sequence
  synthetic circulating small noncoding RNA (sncRNA) 5' YRNA-derived fragment
ggctgggccgaaggtagtgagttatctcga

SEQ ID NO: 27764 - DNA, 38 bp, Artificial Sequence
  synthetic circulating small noncoding RNA (sncRNA) 5' YRNA-derived fragment
agctggttcgatggcagtgggttatcagaacttattaa

SEQ ID NO: 27765 - DNA, 19 bp, Artificial Sequence
  synthetic circulating small noncoding RNA (sncRNA) 5' YRNA-derived fragment
ccagtcaaatttagcagtg

SEQ ID NO: 27766 - DNA, 22 bp, Artificial Sequence
  synthetic circulating small noncoding RNA (sncRNA) 5' YRNA-derived fragment
cagccagtcaaatttagcagtg

SEQ ID NO: 27767 - DNA, 22 bp, Artificial Sequence
  synthetic circulating small noncoding RNA (sncRNA) 5' YRNA-derived fragment
tcccactgctgcacttgactag

SEQ ID NO: 27768 - DNA, 27 bp, Artificial Sequence
  synthetic circulating small noncoding RNA (sncRNA) 5' YRNA-derived fragment
agactagtcaagtgcaggagtgagaag

SEQ ID NO: 27769 - DNA, 18 bp, Artificial Sequence
  synthetic circulating small noncoding RNA (sncRNA) 5' YRNA-derived fragment
actactatcggaccagcc

SEQ ID NO: 27770 - DNA, 32 bp, Artificial Sequence
  synthetic circulating small noncoding RNA (sncRNA) 5' YRNA-derived fragment
tagacagtcacatttagtagtggggggttgta

SEQ ID NO: 27771 - DNA, 27 bp, Artificial Sequence
  synthetic circulating small noncoding RNA (sncRNA) 5' YRNA-derived fragment
cccccacaactaaatttgactggcttt

SEQ ID NO: 27772 - DNA, 35 bp, Artificial Sequence
  synthetic circulating small noncoding RNA (sncRNA) 5' YRNA-derived fragment
gctggttcgatggcagtgggttatcagaacttatt

SEQ ID NO: 27773 - DNA, 40 bp, Artificial Sequence
  synthetic circulating small noncoding RNA (sncRNA) 5' YRNA-derived fragment
tagccagtcaaatttagcagttgggggttttataccaact

SEQ ID NO: 27774 - DNA, 23 bp, Artificial Sequence
  synthetic circulating small noncoding RNA (sncRNA) 5' YRNA-derived fragment
ccactgctaaatttggctggctt

SEQ ID NO: 27775 - DNA, 24 bp, Artificial Sequence
  synthetic circulating small noncoding RNA (sncRNA) 5' YRNA-derived fragment
aattgagataactcactaccttcg

SEQ ID NO: 27776 - DNA, 32 bp, Artificial Sequence
  synthetic circulating small noncoding RNA (sncRNA) 5' YRNA-derived fragment
tagccagtcaaatttagcagttgggggtttta

SEQ ID NO: 27777 - DNA, 27 bp, Artificial Sequence
  synthetic circulating small noncoding RNA (sncRNA) 5' YRNA-derived fragment
tcacagtcagttacagatcgaactcct

SEQ ID NO: 27778 - DNA, 33 bp, Artificial Sequence
  synthetic circulating small noncoding RNA (sncRNA) 5' YRNA-derived fragment
aagccattcaaatttagcagtggggggttgtat

SEQ ID NO: 27779 - DNA, 20 bp, Artificial Sequence
  synthetic circulating small noncoding RNA (sncRNA) 5' YRNA-derived fragment
agtcaagtgacgcagtggga

SEQ ID NO: 27780 - DNA, 26 bp, Artificial Sequence
  synthetic circulating small noncoding RNA (sncRNA) 5' YRNA-derived fragment
agactagtaaagtgcagtagtgagaa

SEQ ID NO: 27781 - DNA, 23 bp, Artificial Sequence
  synthetic circulating small noncoding RNA (sncRNA) 5' YRNA-derived fragment
gttctgataacccaccaccatgg

SEQ ID NO: 27782 - DNA, 20 bp, Artificial Sequence
  synthetic circulating small noncoding RNA (sncRNA) 5' YRNA-derived fragment
agtcaaatttagcagtgggg

SEQ ID NO: 27783 - DNA, 31 bp, Artificial Sequence
  synthetic circulating small noncoding RNA (sncRNA) 5' YRNA-derived fragment
taataagttctgataacccactaccatcgaa

SEQ ID NO: 27784 - DNA, 35 bp, Artificial Sequence
  synthetic circulating small noncoding RNA (sncRNA) 5' YRNA-derived fragment
tatacaaaccccccactgctaaatttgactggctt

SEQ ID NO: 27785 - DNA, 27 bp, Artificial Sequence
  synthetic circulating small noncoding RNA (sncRNA) 5' YRNA-derived fragment
tgataacccaccaccattggaccagcc

SEQ ID NO: 27786 - DNA, 21 bp, Artificial Sequence
  synthetic circulating small noncoding RNA (sncRNA) 5' YRNA-derived fragment
gggttatcagaacttattaac

SEQ ID NO: 27787 - DNA, 27 bp, Artificial Sequence
  synthetic circulating small noncoding RNA (sncRNA) 5' YRNA-derived fragment
gatagtcaagtgaagcagtgggagtgg

SEQ ID NO: 27788 - DNA, 28 bp, Artificial Sequence
  synthetic circulating small noncoding RNA (sncRNA) 5' YRNA-derived fragment
ctatggtagtgggttatcagaacttatt

SEQ ID NO: 27789 - DNA, 18 bp, Artificial Sequence
  synthetic circulating small noncoding RNA (sncRNA) 5' YRNA-derived fragment
ctgcttcacttgactagt

SEQ ID NO: 27790 - DNA, 33 bp, Artificial Sequence
  synthetic circulating small noncoding RNA (sncRNA) 5' YRNA-derived fragment
aattgagataactcactacctttggaccagcct

SEQ ID NO: 27791 - DNA, 20 bp, Artificial Sequence
  synthetic circulating small noncoding RNA (sncRNA) 5' YRNA-derived fragment
attaacattagtgtcactaa

SEQ ID NO: 27792 - DNA, 27 bp, Artificial Sequence
  synthetic circulating small noncoding RNA (sncRNA) 5' YRNA-derived fragment
ggtctgatggtagtgggttatcagaac

SEQ ID NO: 27793 - DNA, 45 bp, Artificial Sequence
  synthetic circulating small noncoding RNA (sncRNA) 5' YRNA-derived fragment
actaatgttaataagttctgataacccactaccatccgacaagcc

SEQ ID NO: 27794 - DNA, 36 bp, Artificial Sequence
  synthetic circulating small noncoding RNA (sncRNA) 5' YRNA-derived fragment
agttcgatctgtaactgactgtgaacaatcaattga

SEQ ID NO: 27795 - DNA, 25 bp, Artificial Sequence
  synthetic circulating small noncoding RNA (sncRNA) 5' YRNA-derived fragment
agttctgatgacccactaccatcgg

SEQ ID NO: 27796 - DNA, 23 bp, Artificial Sequence
  synthetic circulating small noncoding RNA (sncRNA) 5' YRNA-derived fragment
tagtgggttatcagaacttgtta

SEQ ID NO: 27797 - DNA, 24 bp, Artificial Sequence
  synthetic circulating small noncoding RNA (sncRNA) 5' YRNA-derived fragment
cactgctaaatttgactggcttat

SEQ ID NO: 27798 - DNA, 26 bp, Artificial Sequence
  synthetic circulating small noncoding RNA (sncRNA) 5' YRNA-derived fragment
aaagctagtcaagtgaagcagtggga

SEQ ID NO: 27799 - DNA, 39 bp, Artificial Sequence
  synthetic circulating small noncoding RNA (sncRNA) 5' YRNA-derived fragment
ggctggtctgatggtagtgggttatcagagcttattaac

SEQ ID NO: 27800 - DNA, 33 bp, Artificial Sequence
  synthetic circulating small noncoding RNA (sncRNA) 5' YRNA-derived fragment
aggctagtcaagtgaagcagtgagagtggagca

SEQ ID NO: 27801 - DNA, 19 bp, Artificial Sequence
  synthetic circulating small noncoding RNA (sncRNA) 5' YRNA-derived fragment
cactacctttggaccagac

SEQ ID NO: 27802 - DNA, 18 bp, Artificial Sequence
  synthetic circulating small noncoding RNA (sncRNA) 5' YRNA-derived fragment
tttctgataacccactac

SEQ ID NO: 27803 - DNA, 36 bp, Artificial Sequence
  synthetic circulating small noncoding RNA (sncRNA) 5' YRNA-derived fragment
cttctccactctcactgcttcatttgactagccttt

SEQ ID NO: 27804 - DNA, 27 bp, Artificial Sequence
  synthetic circulating small noncoding RNA (sncRNA) 5' YRNA-derived fragment
aaggatagtcaagtgaagcagtgggag

SEQ ID NO: 27805 - DNA, 45 bp, Artificial Sequence
  synthetic circulating small noncoding RNA (sncRNA) 5' YRNA-derived fragment
ggtctctttgttccttctccactcccactgcttcacttgactagc

SEQ ID NO: 27806 - DNA, 26 bp, Artificial Sequence
  synthetic circulating small noncoding RNA (sncRNA) 5' YRNA-derived fragment
agttctgataacccactactatcgga

SEQ ID NO: 27807 - DNA, 20 bp, Artificial Sequence
  synthetic circulating small noncoding RNA (sncRNA) 5' YRNA-derived fragment
taagttctgataaccaacta

SEQ ID NO: 27808 - DNA, 32 bp, Artificial Sequence
  synthetic circulating small noncoding RNA (sncRNA) 5' YRNA-derived fragment
gctggtccgatggtagcgggttatcagaacct

SEQ ID NO: 27809 - DNA, 24 bp, Artificial Sequence
  synthetic circulating small noncoding RNA (sncRNA) 5' YRNA-derived fragment
caagccagtcaaatttagcagtgg

SEQ ID NO: 27810 - DNA, 24 bp, Artificial Sequence
  synthetic circulating small noncoding RNA (sncRNA) 5' YRNA-derived fragment
gccagtcaaatttagcagtggggt

SEQ ID NO: 27811 - DNA, 23 bp, Artificial Sequence
  synthetic circulating small noncoding RNA (sncRNA) 5' YRNA-derived fragment
cccccaactactaaatttgactg

SEQ ID NO: 27812 - DNA, 35 bp, Artificial Sequence
  synthetic circulating small noncoding RNA (sncRNA) 5' YRNA-derived fragment
atcaattgagataactcactacctttggaccagac

SEQ ID NO: 27813 - DNA, 33 bp, Artificial Sequence
  synthetic circulating small noncoding RNA (sncRNA) 5' YRNA-derived fragment
ttgtctgatggtagtgggttatcagaacttatt

SEQ ID NO: 27814 - DNA, 33 bp, Artificial Sequence
  synthetic circulating small noncoding RNA (sncRNA) 5' YRNA-derived fragment
taagccagtcaaatttagcagtgaggggttgta

SEQ ID NO: 27815 - DNA, 24 bp, Artificial Sequence
  synthetic circulating small noncoding RNA (sncRNA) 5' YRNA-derived fragment
ccccccattgctaaattggactgg

SEQ ID NO: 27816 - DNA, 19 bp, Artificial Sequence
  synthetic circulating small noncoding RNA (sncRNA) 5' YRNA-derived fragment
gtagtgggttatcaggact

SEQ ID NO: 27817 - DNA, 34 bp, Artificial Sequence
  synthetic circulating small noncoding RNA (sncRNA) 5' YRNA-derived fragment
tccttcactcccactgcttcacttgactagcctt

SEQ ID NO: 27818 - DNA, 18 bp, Artificial Sequence
  synthetic circulating small noncoding RNA (sncRNA) 5' YRNA-derived fragment
tagtggattatccgaact

SEQ ID NO: 27819 - DNA, 32 bp, Artificial Sequence
  synthetic circulating small noncoding RNA (sncRNA) 5' YRNA-derived fragment
ttttgagataactcactacctttggtccagcc

SEQ ID NO: 27820 - DNA, 18 bp, Artificial Sequence
  synthetic circulating small noncoding RNA (sncRNA) 5' YRNA-derived fragment
gtctggtctgaaggtagt

SEQ ID NO: 27821 - DNA, 28 bp, Artificial Sequence
  synthetic circulating small noncoding RNA (sncRNA) 5' YRNA-derived fragment
ttagtgacaccaatgttaatcagttctg

SEQ ID NO: 27822 - DNA, 33 bp, Artificial Sequence
  synthetic circulating small noncoding RNA (sncRNA) 5' YRNA-derived fragment
tccttcactcccactgcttcacttgactagcct

SEQ ID NO: 27823 - DNA, 25 bp, Artificial Sequence
  synthetic circulating small noncoding RNA (sncRNA) 5' YRNA-derived fragment
gctagtcaagtgaagcagtgggagt

SEQ ID NO: 27824 - DNA, 22 bp, Artificial Sequence
  synthetic circulating small noncoding RNA (sncRNA) 5' YRNA-derived fragment
agtgttgtgggttattgttaag

SEQ ID NO: 27825 - DNA, 19 bp, Artificial Sequence
  synthetic circulating small noncoding RNA (sncRNA) 5' YRNA-derived fragment
aaccagtcaaatttagcag

SEQ ID NO: 27826 - DNA, 28 bp, Artificial Sequence
  synthetic circulating small noncoding RNA (sncRNA) 5' YRNA-derived fragment
agttctgataacccaacaccattggacc

SEQ ID NO: 27827 - DNA, 25 bp, Artificial Sequence
  synthetic circulating small noncoding RNA (sncRNA) 5' YRNA-derived fragment
gcaagtcaagtgaagcagtgggagt

SEQ ID NO: 27828 - DNA, 23 bp, Artificial Sequence
  synthetic circulating small noncoding RNA (sncRNA) 5' YRNA-derived fragment
tgatggtagtgggttatcaggac

SEQ ID NO: 27829 - DNA, 31 bp, Artificial Sequence
  synthetic circulating small noncoding RNA (sncRNA) 5' YRNA-derived fragment
cgctggtccgagtgcagtggtgtttacaact

SEQ ID NO: 27830 - DNA, 46 bp, Artificial Sequence
  synthetic circulating small noncoding RNA (sncRNA) 5' YRNA-derived fragment
gagtggagaaggaacaaagaaatctgtaactggttgtgatcaatta

SEQ ID NO: 27831 - DNA, 32 bp, Artificial Sequence
  synthetic circulating small noncoding RNA (sncRNA) 5' YRNA-derived fragment
ggctggtccaaaggcagtgagttatctcaatt

SEQ ID NO: 27832 - DNA, 29 bp, Artificial Sequence
  synthetic circulating small noncoding RNA (sncRNA) 5' YRNA-derived fragment
cagttggtccgagtgttgtgggttattgt

SEQ ID NO: 27833 - DNA, 22 bp, Artificial Sequence
  synthetic circulating small noncoding RNA (sncRNA) 5' YRNA-derived fragment
gatggcagtgggttatcagaac

SEQ ID NO: 27834 - DNA, 36 bp, Artificial Sequence
  synthetic circulating small noncoding RNA (sncRNA) 5' YRNA-derived fragment
ttagtgtcactaaagttggtatacaaccccccactg

SEQ ID NO: 27835 - DNA, 19 bp, Artificial Sequence
  synthetic circulating small noncoding RNA (sncRNA) 5' YRNA-derived fragment
ggctggtcagatggtagtg

SEQ ID NO: 27836 - DNA, 37 bp, Artificial Sequence
  synthetic circulating small noncoding RNA (sncRNA) 5' YRNA-derived fragment
ttagtcaagtaaagcagtgggagtggagaaggaacaa

SEQ ID NO: 27837 - DNA, 25 bp, Artificial Sequence
  synthetic circulating small noncoding RNA (sncRNA) 5' YRNA-derived fragment
ttggttacagatcgaactccttgtt

SEQ ID NO: 27838 - DNA, 18 bp, Artificial Sequence
  synthetic circulating small noncoding RNA (sncRNA) 5' YRNA-derived fragment
ggcttgtctgatagtagt

SEQ ID NO: 27839 - DNA, 20 bp, Artificial Sequence
  synthetic circulating small noncoding RNA (sncRNA) 5' YRNA-derived fragment
atttagcagtggggggttgt

SEQ ID NO: 27840 - DNA, 38 bp, Artificial Sequence
  synthetic circulating small noncoding RNA (sncRNA) 5' YRNA-derived fragment
ggctggtccaatggtagtggtttatcagaacttattca

SEQ ID NO: 27841 - DNA, 20 bp, Artificial Sequence
  synthetic circulating small noncoding RNA (sncRNA) 5' YRNA-derived fragment
tgccactgcttcacctgact

SEQ ID NO: 27842 - DNA, 36 bp, Artificial Sequence
  synthetic circulating small noncoding RNA (sncRNA) 5' YRNA-derived fragment
ggctggtccaatagtagtgggttatcagaacttgtt

SEQ ID NO: 27843 - DNA, 24 bp, Artificial Sequence
  synthetic circulating small noncoding RNA (sncRNA) 5' YRNA-derived fragment
tgttaataagttctgataaccccc

SEQ ID NO: 27844 - DNA, 22 bp, Artificial Sequence
  synthetic circulating small noncoding RNA (sncRNA) 5' YRNA-derived fragment
ggctggtccgaaggtaaggagt

SEQ ID NO: 27845 - DNA, 41 bp, Artificial Sequence
  synthetic circulating small noncoding RNA (sncRNA) 5' YRNA-derived fragment
taattgatcacaaccagttacagatttctttgttccttctc

SEQ ID NO: 27846 - DNA, 32 bp, Artificial Sequence
  synthetic circulating small noncoding RNA (sncRNA) 5' YRNA-derived fragment
ggctagtcaagtgaagcagtgggagtggagaa

SEQ ID NO: 27847 - DNA, 26 bp, Artificial Sequence
  synthetic circulating small noncoding RNA (sncRNA) 5' YRNA-derived fragment
agtgacactaatgttaataagttctg

SEQ ID NO: 27848 - DNA, 25 bp, Artificial Sequence
  synthetic circulating small noncoding RNA (sncRNA) 5' YRNA-derived fragment
cttctcactactacacttgactaat

SEQ ID NO: 27849 - DNA, 24 bp, Artificial Sequence
  synthetic circulating small noncoding RNA (sncRNA) 5' YRNA-derived fragment
ttctcactactacacttcactagt

SEQ ID NO: 27850 - DNA, 43 bp, Artificial Sequence
  synthetic circulating small noncoding RNA (sncRNA) 5' YRNA-derived fragment
ggctggtccgatggtagtgatttatcagaacttattaacatta

SEQ ID NO: 27851 - DNA, 26 bp, Artificial Sequence
  synthetic circulating small noncoding RNA (sncRNA) 5' YRNA-derived fragment
cgagtgttgtgggttattgttaagtt

SEQ ID NO: 27852 - DNA, 28 bp, Artificial Sequence
  synthetic circulating small noncoding RNA (sncRNA) 5' YRNA-derived fragment
cactccctctgcttcacttgactagcct

SEQ ID NO: 27853 - DNA, 21 bp, Artificial Sequence
  synthetic circulating small noncoding RNA (sncRNA) 5' YRNA-derived fragment
tagtagtgggttatcagaact

SEQ ID NO: 27854 - DNA, 36 bp, Artificial Sequence
  synthetic circulating small noncoding RNA (sncRNA) 5' YRNA-derived fragment
cttcgccactcccactgtttcacttgactagccaaa

SEQ ID NO: 27855 - DNA, 25 bp, Artificial Sequence
  synthetic circulating small noncoding RNA (sncRNA) 5' YRNA-derived fragment
ctccactcccactgcttcacttgac

SEQ ID NO: 27856 - DNA, 27 bp, Artificial Sequence
  synthetic circulating small noncoding RNA (sncRNA) 5' YRNA-derived fragment
accagtcaaatttagcagtggggggtt

SEQ ID NO: 27857 - DNA, 18 bp, Artificial Sequence
  synthetic circulating small noncoding RNA (sncRNA) 5' YRNA-derived fragment
tagtgggttatctgaact

SEQ ID NO: 27858 - DNA, 32 bp, Artificial Sequence
  synthetic circulating small noncoding RNA (sncRNA) 5' YRNA-derived fragment
aagttctgataacccactaccattggaccaac

SEQ ID NO: 27859 - DNA, 19 bp, Artificial Sequence
  synthetic circulating small noncoding RNA (sncRNA) 5' YRNA-derived fragment
gtagtgggttaccagaact

SEQ ID NO: 27860 - DNA, 24 bp, Artificial Sequence
  synthetic circulating small noncoding RNA (sncRNA) 5' YRNA-derived fragment
ggagttcgatctgtaactgactgt

SEQ ID NO: 27861 - DNA, 33 bp, Artificial Sequence
  synthetic circulating small noncoding RNA (sncRNA) 5' YRNA-derived fragment
ttctccattcccactgcttcactagactagcct

SEQ ID NO: 27862 - DNA, 19 bp, Artificial Sequence
  synthetic circulating small noncoding RNA (sncRNA) 5' YRNA-derived fragment
gtagcaggttatcagaact

SEQ ID NO: 27863 - DNA, 26 bp, Artificial Sequence
  synthetic circulating small noncoding RNA (sncRNA) 5' YRNA-derived fragment
ccactcccactgcttcgcttgactag

SEQ ID NO: 27864 - DNA, 23 bp, Artificial Sequence
  synthetic circulating small noncoding RNA (sncRNA) 5' YRNA-derived fragment
ctagtcaagggaagcagtgggag

SEQ ID NO: 27865 - DNA, 23 bp, Artificial Sequence
  synthetic circulating small noncoding RNA (sncRNA) 5' YRNA-derived fragment
cagtcacatttagcagtgtgggg

SEQ ID NO: 27866 - DNA, 33 bp, Artificial Sequence
  synthetic circulating small noncoding RNA (sncRNA) 5' YRNA-derived fragment
tggctagtcaagtgaagcagtgggagtagagaa

SEQ ID NO: 27867 - DNA, 20 bp, Artificial Sequence
  synthetic circulating small noncoding RNA (sncRNA) 5' YRNA-derived fragment
agttctgataacccactact

SEQ ID NO: 27868 - DNA, 34 bp, Artificial Sequence
  synthetic circulating small noncoding RNA (sncRNA) 5' YRNA-derived fragment
ggctggtctgatggtagtgggttatcagaattta

SEQ ID NO: 27869 - DNA, 23 bp, Artificial Sequence
  synthetic circulating small noncoding RNA (sncRNA) 5' YRNA-derived fragment
ctagtcaagtgacgcagtgggag

SEQ ID NO: 27870 - DNA, 33 bp, Artificial Sequence
  synthetic circulating small noncoding RNA (sncRNA) 5' YRNA-derived fragment
tttccccccttctcactactgcacttgactagt

SEQ ID NO: 27871 - DNA, 25 bp, Artificial Sequence
  synthetic circulating small noncoding RNA (sncRNA) 5' YRNA-derived fragment
aggatagtcaagtgaagcagtggga

SEQ ID NO: 27872 - DNA, 27 bp, Artificial Sequence
  synthetic circulating small noncoding RNA (sncRNA) 5' YRNA-derived fragment
agccagtcaaatttagcagtggggggc

SEQ ID NO: 27873 - DNA, 32 bp, Artificial Sequence
  synthetic circulating small noncoding RNA (sncRNA) 5' YRNA-derived fragment
ctaattgatcacaaccagttacagattttttc

SEQ ID NO: 27874 - DNA, 31 bp, Artificial Sequence
  synthetic circulating small noncoding RNA (sncRNA) 5' YRNA-derived fragment
gttctgataatccactgccattggacaagtg

SEQ ID NO: 27875 - DNA, 24 bp, Artificial Sequence
  synthetic circulating small noncoding RNA (sncRNA) 5' YRNA-derived fragment
aagccattcaaatttagcagtggg

SEQ ID NO: 27876 - DNA, 38 bp, Artificial Sequence
  synthetic circulating small noncoding RNA (sncRNA) 5' YRNA-derived fragment
ggctggtccgatggtagcgggttatcagaacctattaa

SEQ ID NO: 27877 - DNA, 33 bp, Artificial Sequence
  synthetic circulating small noncoding RNA (sncRNA) 5' YRNA-derived fragment
tggtacaatggtagtgggttatcagaacttatt

SEQ ID NO: 27878 - DNA, 33 bp, Artificial Sequence
  synthetic circulating small noncoding RNA (sncRNA) 5' YRNA-derived fragment
tctccaatcccactgcttcacttgactagcctt

SEQ ID NO: 27879 - DNA, 23 bp, Artificial Sequence
  synthetic circulating small noncoding RNA (sncRNA) 5' YRNA-derived fragment
aaagccagttaaatttagcagtc

SEQ ID NO: 27880 - DNA, 33 bp, Artificial Sequence
  synthetic circulating small noncoding RNA (sncRNA) 5' YRNA-derived fragment
agctagtcaagtgaagcagtgggagtggagaag

SEQ ID NO: 27881 - DNA, 25 bp, Artificial Sequence
  synthetic circulating small noncoding RNA (sncRNA) 5' YRNA-derived fragment
ggtccgatggtagtgggttatcaga

SEQ ID NO: 27882 - DNA, 32 bp, Artificial Sequence
  synthetic circulating small noncoding RNA (sncRNA) 5' YRNA-derived fragment
ggctggtccaatggtagtcagttatctcaatt

SEQ ID NO: 27883 - DNA, 40 bp, Artificial Sequence
  synthetic circulating small noncoding RNA (sncRNA) 5' YRNA-derived fragment
gaaggaacaaagaaatctgtaactggttgtgagcaattcg

SEQ ID NO: 27884 - DNA, 35 bp, Artificial Sequence
  synthetic circulating small noncoding RNA (sncRNA) 5' YRNA-derived fragment
tgattgtctgaaggtagtgagttatctcaattgat

SEQ ID NO: 27885 - DNA, 19 bp, Artificial Sequence
  synthetic circulating small noncoding RNA (sncRNA) 5' YRNA-derived fragment
gctaagtttgactggcttt

SEQ ID NO: 27886 - DNA, 24 bp, Artificial Sequence
  synthetic circulating small noncoding RNA (sncRNA) 5' YRNA-derived fragment
taacccactaccttcggacgagcc

SEQ ID NO: 27887 - DNA, 27 bp, Artificial Sequence
  synthetic circulating small noncoding RNA (sncRNA) 5' YRNA-derived fragment
gctggtccgatggtagcgggttatcag

SEQ ID NO: 27888 - DNA, 34 bp, Artificial Sequence
  synthetic circulating small noncoding RNA (sncRNA) 5' YRNA-derived fragment
ccttgttctactctttccccccttctcactactg

SEQ ID NO: 27889 - DNA, 29 bp, Artificial Sequence
  synthetic circulating small noncoding RNA (sncRNA) 5' YRNA-derived fragment
agttctgataatccactgccattggacaa

SEQ ID NO: 27890 - DNA, 25 bp, Artificial Sequence
  synthetic circulating small noncoding RNA (sncRNA) 5' YRNA-derived fragment
cccccctgctaaatttgactggcta

SEQ ID NO: 27891 - DNA, 21 bp, Artificial Sequence
  synthetic circulating small noncoding RNA (sncRNA) 5' YRNA-derived fragment
aattttagtgacactaatgtt

SEQ ID NO: 27892 - DNA, 22 bp, Artificial Sequence
  synthetic circulating small noncoding RNA (sncRNA) 5' YRNA-derived fragment
ggctggtctgagggcagtggtg

SEQ ID NO: 27893 - DNA, 19 bp, Artificial Sequence
  synthetic circulating small noncoding RNA (sncRNA) 5' YRNA-derived fragment
cactactgcacttgactag

SEQ ID NO: 27894 - DNA, 31 bp, Artificial Sequence
  synthetic circulating small noncoding RNA (sncRNA) 5' YRNA-derived fragment
tccattcccacttcttcacttgactagcctt

SEQ ID NO: 27895 - DNA, 36 bp, Artificial Sequence
  synthetic circulating small noncoding RNA (sncRNA) 5' YRNA-derived fragment
aataagttctgataacccactatcattggaccaacc

SEQ ID NO: 27896 - DNA, 34 bp, Artificial Sequence
  synthetic circulating small noncoding RNA (sncRNA) 5' YRNA-derived fragment
agactagtcaagtgcagtagtgagaaggggggaa

SEQ ID NO: 27897 - DNA, 22 bp, Artificial Sequence
  synthetic circulating small noncoding RNA (sncRNA) 5' YRNA-derived fragment
tcccactgctttacttgactag

SEQ ID NO: 27898 - DNA, 26 bp, Artificial Sequence
  synthetic circulating small noncoding RNA (sncRNA) 5' YRNA-derived fragment
ggctggtccaatgatagtgggttatc

SEQ ID NO: 27899 - DNA, 30 bp, Artificial Sequence
  synthetic circulating small noncoding RNA (sncRNA) 5' YRNA-derived fragment
ttctgataacccactaccattggaccaacc

SEQ ID NO: 27900 - DNA, 23 bp, Artificial Sequence
  synthetic circulating small noncoding RNA (sncRNA) 5' YRNA-derived fragment
ccccccattgctaaatttgactg

SEQ ID NO: 27901 - DNA, 25 bp, Artificial Sequence
  synthetic circulating small noncoding RNA (sncRNA) 5' YRNA-derived fragment
ataacccactaccattggaccagcc

SEQ ID NO: 27902 - DNA, 38 bp, Artificial Sequence
  synthetic circulating small noncoding RNA (sncRNA) 5' YRNA-derived fragment
atgttaatttctgataacccactaccatcggaccagcc

SEQ ID NO: 27903 - DNA, 24 bp, Artificial Sequence
  synthetic circulating small noncoding RNA (sncRNA) 5' YRNA-derived fragment
cacccactcctaaatttgcctggc

SEQ ID NO: 27904 - DNA, 43 bp, Artificial Sequence
  synthetic circulating small noncoding RNA (sncRNA) 5' YRNA-derived fragment
gtagtgggttatcagaacttattaacattagtgtcactaaagt

SEQ ID NO: 27905 - DNA, 24 bp, Artificial Sequence
  synthetic circulating small noncoding RNA (sncRNA) 5' YRNA-derived fragment
ctctcactactgcacttgactagt

SEQ ID NO: 27906 - DNA, 21 bp, Artificial Sequence
  synthetic circulating small noncoding RNA (sncRNA) 5' YRNA-derived fragment
agtcaagtgcagtagtgagga

SEQ ID NO: 27907 - DNA, 45 bp, Artificial Sequence
  synthetic circulating small noncoding RNA (sncRNA) 5' YRNA-derived fragment
tcagccagtcaaatttagcagtggggggttgtataccaactttag

SEQ ID NO: 27908 - DNA, 40 bp, Artificial Sequence
  synthetic circulating small noncoding RNA (sncRNA) 5' YRNA-derived fragment
gccagtcaaatttagcagttgggggttttataccaacttt

SEQ ID NO: 27909 - DNA, 29 bp, Artificial Sequence
  synthetic circulating small noncoding RNA (sncRNA) 5' YRNA-derived fragment
tttgactagtcaagtgcagtagtgagaag

SEQ ID NO: 27910 - DNA, 29 bp, Artificial Sequence
  synthetic circulating small noncoding RNA (sncRNA) 5' YRNA-derived fragment
aatgagttctgataacccactaccatcgg

SEQ ID NO: 27911 - DNA, 33 bp, Artificial Sequence
  synthetic circulating small noncoding RNA (sncRNA) 5' YRNA-derived fragment
aagttctgataacctactacaatggaaccagcc

SEQ ID NO: 27912 - DNA, 23 bp, Artificial Sequence
  synthetic circulating small noncoding RNA (sncRNA) 5' YRNA-derived fragment
actaggcaagtgaagcagtggga

SEQ ID NO: 27913 - DNA, 23 bp, Artificial Sequence
  synthetic circulating small noncoding RNA (sncRNA) 5' YRNA-derived fragment
actaacattagtgtcactaaagt

SEQ ID NO: 27914 - DNA, 24 bp, Artificial Sequence
  synthetic circulating small noncoding RNA (sncRNA) 5' YRNA-derived fragment
agttctgataacccactaccattg

SEQ ID NO: 27915 - DNA, 27 bp, Artificial Sequence
  synthetic circulating small noncoding RNA (sncRNA) 5' YRNA-derived fragment
ggctggtccgatggtagtgatttatca

SEQ ID NO: 27916 - DNA, 30 bp, Artificial Sequence
  synthetic circulating small noncoding RNA (sncRNA) 5' YRNA-derived fragment
gacccccccactgctaaatttgactggctt

SEQ ID NO: 27917 - DNA, 36 bp, Artificial Sequence
  synthetic circulating small noncoding RNA (sncRNA) 5' YRNA-derived fragment
agatggtccgaaggtagtgagttatctcaattgatt

SEQ ID NO: 27918 - DNA, 20 bp, Artificial Sequence
  synthetic circulating small noncoding RNA (sncRNA) 5' YRNA-derived fragment
agtagtgggttatcagaact

SEQ ID NO: 27919 - DNA, 26 bp, Artificial Sequence
  synthetic circulating small noncoding RNA (sncRNA) 5' YRNA-derived fragment
ggctggtctgagggtagtgagttatc

SEQ ID NO: 27920 - DNA, 39 bp, Artificial Sequence
  synthetic circulating small noncoding RNA (sncRNA) 5' YRNA-derived fragment
gttagtaagctctgacaacccactaccatcggaccagcc

SEQ ID NO: 27921 - DNA, 31 bp, Artificial Sequence
  synthetic circulating small noncoding RNA (sncRNA) 5' YRNA-derived fragment
attgagataactcactactttcagaccagcc

SEQ ID NO: 27922 - DNA, 22 bp, Artificial Sequence
  synthetic circulating small noncoding RNA (sncRNA) 5' YRNA-derived fragment
cccccattgctaaattggactg

SEQ ID NO: 27923 - DNA, 44 bp, Artificial Sequence
  synthetic circulating small noncoding RNA (sncRNA) 5' YRNA-derived fragment
aaggctagtcaaatgaagcagtgggaggggagaaggaacaaaga

SEQ ID NO: 27924 - DNA, 30 bp, Artificial Sequence
  synthetic circulating small noncoding RNA (sncRNA) 5' YRNA-derived fragment
taagttctgataacctactaccatcggacc

SEQ ID NO: 27925 - DNA, 37 bp, Artificial Sequence
  synthetic circulating small noncoding RNA (sncRNA) 5' YRNA-derived fragment
gttccttctccactcccactgcttcacttaactagta

SEQ ID NO: 27926 - DNA, 41 bp, Artificial Sequence
  synthetic circulating small noncoding RNA (sncRNA) 5' YRNA-derived fragment
aggctagtcaagtgaagcagtgggagtggagaaggaacaaa

SEQ ID NO: 27927 - DNA, 22 bp, Artificial Sequence
  synthetic circulating small noncoding RNA (sncRNA) 5' YRNA-derived fragment
cgatggtagtgggttatcagaa

SEQ ID NO: 27928 - DNA, 25 bp, Artificial Sequence
  synthetic circulating small noncoding RNA (sncRNA) 5' YRNA-derived fragment
gataacccactaccatcggaccagt

SEQ ID NO: 27929 - DNA, 23 bp, Artificial Sequence
  synthetic circulating small noncoding RNA (sncRNA) 5' YRNA-derived fragment
actagtcaagtgcagtagtgaga

SEQ ID NO: 27930 - DNA, 21 bp, Artificial Sequence
  synthetic circulating small noncoding RNA (sncRNA) 5' YRNA-derived fragment
ttgttcacagtcagttacaga

SEQ ID NO: 27931 - DNA, 25 bp, Artificial Sequence
  synthetic circulating small noncoding RNA (sncRNA) 5' YRNA-derived fragment
agccagttaaatttagcagtcaggg

SEQ ID NO: 27932 - DNA, 39 bp, Artificial Sequence
  synthetic circulating small noncoding RNA (sncRNA) 5' YRNA-derived fragment
aggaacaaagaaatctgtaactggttgtgatcaattagt

SEQ ID NO: 27933 - DNA, 32 bp, Artificial Sequence
  synthetic circulating small noncoding RNA (sncRNA) 5' YRNA-derived fragment
ggtcctatggtagtgggttatcagaacttatt

SEQ ID NO: 27934 - DNA, 22 bp, Artificial Sequence
  synthetic circulating small noncoding RNA (sncRNA) 5' YRNA-derived fragment
tagcaggttatcagaacttatt

SEQ ID NO: 27935 - DNA, 22 bp, Artificial Sequence
  synthetic circulating small noncoding RNA (sncRNA) 5' YRNA-derived fragment
gacggtagtggattatccgaac

SEQ ID NO: 27936 - DNA, 30 bp, Artificial Sequence
  synthetic circulating small noncoding RNA (sncRNA) 5' YRNA-derived fragment
aagttctgataacccactactatcggacca

SEQ ID NO: 27937 - DNA, 29 bp, Artificial Sequence
  synthetic circulating small noncoding RNA (sncRNA) 5' YRNA-derived fragment
tttagtgacacaaatgtgaataagttctg

SEQ ID NO: 27938 - DNA, 28 bp, Artificial Sequence
  synthetic circulating small noncoding RNA (sncRNA) 5' YRNA-derived fragment
taacattagtgtcactgaagttggtata

SEQ ID NO: 27939 - DNA, 32 bp, Artificial Sequence
  synthetic circulating small noncoding RNA (sncRNA) 5' YRNA-derived fragment
gctggtctgatggtagtgggttatcaggactt

SEQ ID NO: 27940 - DNA, 19 bp, Artificial Sequence
  synthetic circulating small noncoding RNA (sncRNA) 5' YRNA-derived fragment
cagtggaagtggaggagga

SEQ ID NO: 27941 - DNA, 21 bp, Artificial Sequence
  synthetic circulating small noncoding RNA (sncRNA) 5' YRNA-derived fragment
ttagtgtcactgaagttggta

SEQ ID NO: 27942 - DNA, 32 bp, Artificial Sequence
  synthetic circulating small noncoding RNA (sncRNA) 5' YRNA-derived fragment
ggctgctccaaaggtagtgagttatctcaatt

SEQ ID NO: 27943 - DNA, 21 bp, Artificial Sequence
  synthetic circulating small noncoding RNA (sncRNA) 5' YRNA-derived fragment
taacattagtgtcactgaagt

SEQ ID NO: 27944 - DNA, 18 bp, Artificial Sequence
  synthetic circulating small noncoding RNA (sncRNA) 5' YRNA-derived fragment
taacaataacccacaaca

SEQ ID NO: 27945 - DNA, 19 bp, Artificial Sequence
  synthetic circulating small noncoding RNA (sncRNA) 5' YRNA-derived fragment
ctagtcaagtgcagtagtg

SEQ ID NO: 27946 - DNA, 25 bp, Artificial Sequence
  synthetic circulating small noncoding RNA (sncRNA) 5' YRNA-derived fragment
cttctcactactgcacttgacttgt

SEQ ID NO: 27947 - DNA, 30 bp, Artificial Sequence
  synthetic circulating small noncoding RNA (sncRNA) 5' YRNA-derived fragment
ttgagctaactacctaccttcggaccagcc

SEQ ID NO: 27948 - DNA, 30 bp, Artificial Sequence
  synthetic circulating small noncoding RNA (sncRNA) 5' YRNA-derived fragment
gtctgatggtagtgggttatcaggacttat

SEQ ID NO: 27949 - DNA, 31 bp, Artificial Sequence
  synthetic circulating small noncoding RNA (sncRNA) 5' YRNA-derived fragment
cttaacaataacccacaacactcagaccaac

SEQ ID NO: 27950 - DNA, 36 bp, Artificial Sequence
  synthetic circulating small noncoding RNA (sncRNA) 5' YRNA-derived fragment
ggtatacaaccccccactgctaaatttgactggctt

SEQ ID NO: 27951 - DNA, 24 bp, Artificial Sequence
  synthetic circulating small noncoding RNA (sncRNA) 5' YRNA-derived fragment
ggctggtccgagtgcagtggtatt

SEQ ID NO: 27952 - DNA, 32 bp, Artificial Sequence
  synthetic circulating small noncoding RNA (sncRNA) 5' YRNA-derived fragment
aagccagtcaaatttagcagtggggggactgt

SEQ ID NO: 27953 - DNA, 21 bp, Artificial Sequence
  synthetic circulating small noncoding RNA (sncRNA) 5' YRNA-derived fragment
aagccagtcaaatttatcaga

SEQ ID NO: 27954 - DNA, 20 bp, Artificial Sequence
  synthetic circulating small noncoding RNA (sncRNA) 5' YRNA-derived fragment
aacagtagtgtcactaaagt

SEQ ID NO: 27955 - DNA, 27 bp, Artificial Sequence
  synthetic circulating small noncoding RNA (sncRNA) 5' YRNA-derived fragment
tataccaactttagtgacactaatgtt

SEQ ID NO: 27956 - DNA, 35 bp, Artificial Sequence
  synthetic circulating small noncoding RNA (sncRNA) 5' YRNA-derived fragment
gctggtccgatggtagtgggttaccagaacttaat

SEQ ID NO: 27957 - DNA, 40 bp, Artificial Sequence
  synthetic circulating small noncoding RNA (sncRNA) 5' YRNA-derived fragment
tttgttccttctccactcccactgcttcacttgactagcc

SEQ ID NO: 27958 - DNA, 20 bp, Artificial Sequence
  synthetic circulating small noncoding RNA (sncRNA) 5' YRNA-derived fragment
ctaattgatgacaaccagtt

SEQ ID NO: 27959 - DNA, 37 bp, Artificial Sequence
  synthetic circulating small noncoding RNA (sncRNA) 5' YRNA-derived fragment
ccttctccactcccactgcttcacttgactagccttt

SEQ ID NO: 27960 - DNA, 22 bp, Artificial Sequence
  synthetic circulating small noncoding RNA (sncRNA) 5' YRNA-derived fragment
gttctcataacccaccaccatc

SEQ ID NO: 27961 - DNA, 30 bp, Artificial Sequence
  synthetic circulating small noncoding RNA (sncRNA) 5' YRNA-derived fragment
tccactcccactgcttcacttgaatagcct

SEQ ID NO: 27962 - DNA, 29 bp, Artificial Sequence
  synthetic circulating small noncoding RNA (sncRNA) 5' YRNA-derived fragment
ctagactagtcaagtgcagtagtgagaaa

SEQ ID NO: 27963 - DNA, 23 bp, Artificial Sequence
  synthetic circulating small noncoding RNA (sncRNA) 5' YRNA-derived fragment
ccactcccactgcttcacttgac

SEQ ID NO: 27964 - DNA, 23 bp, Artificial Sequence
  synthetic circulating small noncoding RNA (sncRNA) 5' YRNA-derived fragment
taataagttctgataaccaacta

SEQ ID NO: 27965 - DNA, 26 bp, Artificial Sequence
  synthetic circulating small noncoding RNA (sncRNA) 5' YRNA-derived fragment
tactagtcaagtgaaacagtgggagt

SEQ ID NO: 27966 - DNA, 22 bp, Artificial Sequence
  synthetic circulating small noncoding RNA (sncRNA) 5' YRNA-derived fragment
cactcccactgcttcacttgac

SEQ ID NO: 27967 - DNA, 24 bp, Artificial Sequence
  synthetic circulating small noncoding RNA (sncRNA) 5' YRNA-derived fragment
agactaggcaagtgaagcagtggg

SEQ ID NO: 27968 - DNA, 35 bp, Artificial Sequence
  synthetic circulating small noncoding RNA (sncRNA) 5' YRNA-derived fragment
aaggctagtcaagtgaagcagtgggagtggagaag

SEQ ID NO: 27969 - DNA, 28 bp, Artificial Sequence
  synthetic circulating small noncoding RNA (sncRNA) 5' YRNA-derived fragment
ggtctgatggtagtgggttatcagtggt

SEQ ID NO: 27970 - DNA, 18 bp, Artificial Sequence
  synthetic circulating small noncoding RNA (sncRNA) 5' YRNA-derived fragment
actttagcaacactaatg

SEQ ID NO: 27971 - DNA, 28 bp, Artificial Sequence
  synthetic circulating small noncoding RNA (sncRNA) 5' YRNA-derived fragment
taaagttggtatacaaccccccactgct

SEQ ID NO: 27972 - DNA, 30 bp, Artificial Sequence
  synthetic circulating small noncoding RNA (sncRNA) 5' YRNA-derived fragment
gctggtctgatggtagtgggttatcagaac

SEQ ID NO: 27973 - DNA, 40 bp, Artificial Sequence
  synthetic circulating small noncoding RNA (sncRNA) 5' YRNA-derived fragment
accagtcaaatttagcagtggggggttgtataccaacttt

SEQ ID NO: 27974 - DNA, 31 bp, Artificial Sequence
  synthetic circulating small noncoding RNA (sncRNA) 5' YRNA-derived fragment
ggctgctctgaaggtagtgagttatctcagt

SEQ ID NO: 27975 - DNA, 30 bp, Artificial Sequence
  synthetic circulating small noncoding RNA (sncRNA) 5' YRNA-derived fragment
ggctggtccaaagggagtgaattatctcac

SEQ ID NO: 27976 - DNA, 28 bp, Artificial Sequence
  synthetic circulating small noncoding RNA (sncRNA) 5' YRNA-derived fragment
cagactagtcaagtgcagcagtgagaag

SEQ ID NO: 27977 - DNA, 29 bp, Artificial Sequence
  synthetic circulating small noncoding RNA (sncRNA) 5' YRNA-derived fragment
ttaagccagtcaaatttagcagttggggg

SEQ ID NO: 27978 - DNA, 21 bp, Artificial Sequence
  synthetic circulating small noncoding RNA (sncRNA) 5' YRNA-derived fragment
gtgggttatcagaacttatta

SEQ ID NO: 27979 - DNA, 34 bp, Artificial Sequence
  synthetic circulating small noncoding RNA (sncRNA) 5' YRNA-derived fragment
ttccttctccactcccactgcttcacttgactag

SEQ ID NO: 27980 - DNA, 35 bp, Artificial Sequence
  synthetic circulating small noncoding RNA (sncRNA) 5' YRNA-derived fragment
actagtcaagtgaagcagtgggagtggagaaggaa

SEQ ID NO: 27981 - DNA, 34 bp, Artificial Sequence
  synthetic circulating small noncoding RNA (sncRNA) 5' YRNA-derived fragment
aagccagtaaaatttagcagtggggagttgtata

SEQ ID NO: 27982 - DNA, 33 bp, Artificial Sequence
  synthetic circulating small noncoding RNA (sncRNA) 5' YRNA-derived fragment
ggtcctatggtagtgggttatcagaacttatta

SEQ ID NO: 27983 - DNA, 18 bp, Artificial Sequence
  synthetic circulating small noncoding RNA (sncRNA) 5' YRNA-derived fragment
gctaaatttgtctggctt

SEQ ID NO: 27984 - DNA, 20 bp, Artificial Sequence
  synthetic circulating small noncoding RNA (sncRNA) 5' YRNA-derived fragment
tcaaatttagcagtaggggg

SEQ ID NO: 27985 - DNA, 35 bp, Artificial Sequence
  synthetic circulating small noncoding RNA (sncRNA) 5' YRNA-derived fragment
ctttcaccccttctcactactgcacttgactagtt

SEQ ID NO: 27986 - DNA, 21 bp, Artificial Sequence
  synthetic circulating small noncoding RNA (sncRNA) 5' YRNA-derived fragment
cactgcttcacttgactagcc

SEQ ID NO: 27987 - DNA, 24 bp, Artificial Sequence
  synthetic circulating small noncoding RNA (sncRNA) 5' YRNA-derived fragment
ggcttttccgatggtagtgggtta

SEQ ID NO: 27988 - DNA, 32 bp, Artificial Sequence
  synthetic circulating small noncoding RNA (sncRNA) 5' YRNA-derived fragment
ctccccttctcactactgcacttgactagtct

SEQ ID NO: 27989 - DNA, 23 bp, Artificial Sequence
  synthetic circulating small noncoding RNA (sncRNA) 5' YRNA-derived fragment
ggctggtctgatggtagtgggtt

SEQ ID NO: 27990 - DNA, 26 bp, Artificial Sequence
  synthetic circulating small noncoding RNA (sncRNA) 5' YRNA-derived fragment
ccccaactactaaatttgactggctt

SEQ ID NO: 27991 - DNA, 30 bp, Artificial Sequence
  synthetic circulating small noncoding RNA (sncRNA) 5' YRNA-derived fragment
gttctgataaccccctaccatgggaccaac

SEQ ID NO: 27992 - DNA, 35 bp, Artificial Sequence
  synthetic circulating small noncoding RNA (sncRNA) 5' YRNA-derived fragment
ccttctccactcccactgcttcacttgactagact

SEQ ID NO: 27993 - DNA, 21 bp, Artificial Sequence
  synthetic circulating small noncoding RNA (sncRNA) 5' YRNA-derived fragment
aagctagtcaaatttagcagt

SEQ ID NO: 27994 - DNA, 30 bp, Artificial Sequence
  synthetic circulating small noncoding RNA (sncRNA) 5' YRNA-derived fragment
ccccccattgctaaatttgactggctttta

SEQ ID NO: 27995 - DNA, 23 bp, Artificial Sequence
  synthetic circulating small noncoding RNA (sncRNA) 5' YRNA-derived fragment
gccattcaaatttagcagtgggg

SEQ ID NO: 27996 - DNA, 32 bp, Artificial Sequence
  synthetic circulating small noncoding RNA (sncRNA) 5' YRNA-derived fragment
gcagtagtgagaaggggggaaagagtagaaca

SEQ ID NO: 27997 - DNA, 42 bp, Artificial Sequence
  synthetic circulating small noncoding RNA (sncRNA) 5' YRNA-derived fragment
tagtgggttatcagaacttattaacattagtgtcactaaagt

SEQ ID NO: 27998 - DNA, 39 bp, Artificial Sequence
  synthetic circulating small noncoding RNA (sncRNA) 5' YRNA-derived fragment
agttggtataccacctcccactgctaaatttgactggct

SEQ ID NO: 27999 - DNA, 18 bp, Artificial Sequence
  synthetic circulating small noncoding RNA (sncRNA) 5' YRNA-derived fragment
tcccactgcttcacttga

SEQ ID NO: 28000 - DNA, 19 bp, Artificial Sequence
  synthetic circulating small noncoding RNA (sncRNA) 5' YRNA-derived fragment
tcgatggcagtgggttatc

SEQ ID NO: 28001 - DNA, 28 bp, Artificial Sequence
  synthetic circulating small noncoding RNA (sncRNA) 5' YRNA-derived fragment
tgatggtagtgggttatcaggacttatt

SEQ ID NO: 28002 - DNA, 25 bp, Artificial Sequence
  synthetic circulating small noncoding RNA (sncRNA) 5' YRNA-derived fragment
ataacccattaccatcagaccagcc

SEQ ID NO: 28003 - DNA, 28 bp, Artificial Sequence
  synthetic circulating small noncoding RNA (sncRNA) 5' YRNA-derived fragment
gctggtccgagtgcagtggtgtttacaa

SEQ ID NO: 28004 - DNA, 26 bp, Artificial Sequence
  synthetic circulating small noncoding RNA (sncRNA) 5' YRNA-derived fragment
tggtccgagtgttgtgggttattgtt

SEQ ID NO: 28005 - DNA, 18 bp, Artificial Sequence
  synthetic circulating small noncoding RNA (sncRNA) 5' YRNA-derived fragment
gacactaatgttaataag

SEQ ID NO: 28006 - DNA, 36 bp, Artificial Sequence
  synthetic circulating small noncoding RNA (sncRNA) 5' YRNA-derived fragment
ctctttccccccttctcactactgcacttgactagt

SEQ ID NO: 28007 - DNA, 28 bp, Artificial Sequence
  synthetic circulating small noncoding RNA (sncRNA) 5' YRNA-derived fragment
ccctcgctgctaaatttgactggctttt

SEQ ID NO: 28008 - DNA, 35 bp, Artificial Sequence
  synthetic circulating small noncoding RNA (sncRNA) 5' YRNA-derived fragment
attaataagttctgataacccactaccatcgaacc

SEQ ID NO: 28009 - DNA, 46 bp, Artificial Sequence
  synthetic circulating small noncoding RNA (sncRNA) 5' YRNA-derived fragment
agactagtcaagtgcagtagtgagaaggggggaaagagtagaacaa

SEQ ID NO: 28010 - DNA, 42 bp, Artificial Sequence
  synthetic circulating small noncoding RNA (sncRNA) 5' YRNA-derived fragment
gccagtcaaatttagcagtggggggttgtataccaactttag

SEQ ID NO: 28011 - DNA, 28 bp, Artificial Sequence
  synthetic circulating small noncoding RNA (sncRNA) 5' YRNA-derived fragment
gtctccccccacaaccgcgcttgactag

SEQ ID NO: 28012 - DNA, 39 bp, Artificial Sequence
  synthetic circulating small noncoding RNA (sncRNA) 5' YRNA-derived fragment
actaattcatcacaacaagttacagatttctttgttcct

SEQ ID NO: 28013 - DNA, 24 bp, Artificial Sequence
  synthetic circulating small noncoding RNA (sncRNA) 5' YRNA-derived fragment
ctagtcaagggaagcagtgggagt

SEQ ID NO: 28014 - DNA, 22 bp, Artificial Sequence
  synthetic circulating small noncoding RNA (sncRNA) 5' YRNA-derived fragment
tctgtaactgactgtgaacact

SEQ ID NO: 28015 - DNA, 24 bp, Artificial Sequence
  synthetic circulating small noncoding RNA (sncRNA) 5' YRNA-derived fragment
aagccagtcaaatttagcagtgag

SEQ ID NO: 28016 - DNA, 18 bp, Artificial Sequence
  synthetic circulating small noncoding RNA (sncRNA) 5' YRNA-derived fragment
actaccctcagaccagcc

SEQ ID NO: 28017 - DNA, 23 bp, Artificial Sequence
  synthetic circulating small noncoding RNA (sncRNA) 5' YRNA-derived fragment
agttctcataacccaccaccatc

SEQ ID NO: 28018 - DNA, 24 bp, Artificial Sequence
  synthetic circulating small noncoding RNA (sncRNA) 5' YRNA-derived fragment
atggtagtgggttatcagaactta

SEQ ID NO: 28019 - DNA, 24 bp, Artificial Sequence
  synthetic circulating small noncoding RNA (sncRNA) 5' YRNA-derived fragment
cttctcactactgcatttgactag

SEQ ID NO: 28020 - DNA, 23 bp, Artificial Sequence
  synthetic circulating small noncoding RNA (sncRNA) 5' YRNA-derived fragment
agccagtcaaatttagcagtgag

SEQ ID NO: 28021 - DNA, 19 bp, Artificial Sequence
  synthetic circulating small noncoding RNA (sncRNA) 5' YRNA-derived fragment
aattctgataacccactac

SEQ ID NO: 28022 - DNA, 26 bp, Artificial Sequence
  synthetic circulating small noncoding RNA (sncRNA) 5' YRNA-derived fragment
accccccacgctaagtttgactggct

SEQ ID NO: 28023 - DNA, 23 bp, Artificial Sequence
  synthetic circulating small noncoding RNA (sncRNA) 5' YRNA-derived fragment
gtccgatggtagtgggttatcag

SEQ ID NO: 28024 - DNA, 30 bp, Artificial Sequence
  synthetic circulating small noncoding RNA (sncRNA) 5' YRNA-derived fragment
ctagtcaagtgcagtagtgagaagggggga

SEQ ID NO: 28025 - DNA, 48 bp, Artificial Sequence
  synthetic circulating small noncoding RNA (sncRNA) 5' YRNA-derived fragment
ccttgttctactcttttcccccttctcactactgcccttgactagtct

SEQ ID NO: 28026 - DNA, 23 bp, Artificial Sequence
  synthetic circulating small noncoding RNA (sncRNA) 5' YRNA-derived fragment
ccccgctgctaaatttggctggc

SEQ ID NO: 28027 - DNA, 31 bp, Artificial Sequence
  synthetic circulating small noncoding RNA (sncRNA) 5' YRNA-derived fragment
agctggtccaaaggtagtgagttatctcaat

SEQ ID NO: 28028 - DNA, 26 bp, Artificial Sequence
  synthetic circulating small noncoding RNA (sncRNA) 5' YRNA-derived fragment
tagccagtcagattttagcagtgggg

SEQ ID NO: 28029 - DNA, 26 bp, Artificial Sequence
  synthetic circulating small noncoding RNA (sncRNA) 5' YRNA-derived fragment
ctccccgctgctaaatttggctggct

SEQ ID NO: 28030 - DNA, 27 bp, Artificial Sequence
  synthetic circulating small noncoding RNA (sncRNA) 5' YRNA-derived fragment
tcccccctgctaaatttgactggctaa

SEQ ID NO: 28031 - DNA, 23 bp, Artificial Sequence
  synthetic circulating small noncoding RNA (sncRNA) 5' YRNA-derived fragment
tctgataacccactaccatcgga

SEQ ID NO: 28032 - DNA, 31 bp, Artificial Sequence
  synthetic circulating small noncoding RNA (sncRNA) 5' YRNA-derived fragment
gactggtctgagtgcagtggtgtttacaact

SEQ ID NO: 28033 - DNA, 19 bp, Artificial Sequence
  synthetic circulating small noncoding RNA (sncRNA) 5' YRNA-derived fragment
aactggtggtgatcaatta

SEQ ID NO: 28034 - DNA, 23 bp, Artificial Sequence
  synthetic circulating small noncoding RNA (sncRNA) 5' YRNA-derived fragment
attcccactgcttcacttgacta

SEQ ID NO: 28035 - DNA, 19 bp, Artificial Sequence
  synthetic circulating small noncoding RNA (sncRNA) 5' YRNA-derived fragment
aactggttgtgatcaattc

SEQ ID NO: 28036 - DNA, 21 bp, Artificial Sequence
  synthetic circulating small noncoding RNA (sncRNA) 5' YRNA-derived fragment
tataccaactttagtgacact

SEQ ID NO: 28037 - DNA, 31 bp, Artificial Sequence
  synthetic circulating small noncoding RNA (sncRNA) 5' YRNA-derived fragment
aattgtaaacaccactgcactcagaccagac

SEQ ID NO: 28038 - DNA, 21 bp, Artificial Sequence
  synthetic circulating small noncoding RNA (sncRNA) 5' YRNA-derived fragment
aagccagccaaatttcgcagt

SEQ ID NO: 28039 - DNA, 25 bp, Artificial Sequence
  synthetic circulating small noncoding RNA (sncRNA) 5' YRNA-derived fragment
aaagccagtcaaatttagcggtgag

SEQ ID NO: 28040 - DNA, 19 bp, Artificial Sequence
  synthetic circulating small noncoding RNA (sncRNA) 5' YRNA-derived fragment
aagccagtcaagtttagca

SEQ ID NO: 28041 - DNA, 35 bp, Artificial Sequence
  synthetic circulating small noncoding RNA (sncRNA) 5' YRNA-derived fragment
cggctggtccgagtgcagtggtgtttacaactaat

SEQ ID NO: 28042 - DNA, 33 bp, Artificial Sequence
  synthetic circulating small noncoding RNA (sncRNA) 5' YRNA-derived fragment
ggctggtccaaaggtagtgagttatctcaactg

SEQ ID NO: 28043 - DNA, 25 bp, Artificial Sequence
  synthetic circulating small noncoding RNA (sncRNA) 5' YRNA-derived fragment
tccccgctgctaaatttggctggct

SEQ ID NO: 28044 - DNA, 27 bp, Artificial Sequence
  synthetic circulating small noncoding RNA (sncRNA) 5' YRNA-derived fragment
aagccagtcaaatttagcagtagggga

SEQ ID NO: 28045 - DNA, 22 bp, Artificial Sequence
  synthetic circulating small noncoding RNA (sncRNA) 5' YRNA-derived fragment
ctagtcaagtgaggaactggga

SEQ ID NO: 28046 - DNA, 28 bp, Artificial Sequence
  synthetic circulating small noncoding RNA (sncRNA) 5' YRNA-derived fragment
ccccttctcactactgcacttgactagt

SEQ ID NO: 28047 - DNA, 25 bp, Artificial Sequence
  synthetic circulating small noncoding RNA (sncRNA) 5' YRNA-derived fragment
aaaccagtcaaatttagcagtgggg

SEQ ID NO: 28048 - DNA, 25 bp, Artificial Sequence
  synthetic circulating small noncoding RNA (sncRNA) 5' YRNA-derived fragment
agccagtcaaatttagcagtgaggg

SEQ ID NO: 28049 - DNA, 45 bp, Artificial Sequence
  synthetic circulating small noncoding RNA (sncRNA) 5' YRNA-derived fragment
ggggttgtataccaactttagtgacactaatgttaataagttctg

SEQ ID NO: 28050 - DNA, 28 bp, Artificial Sequence
  synthetic circulating small noncoding RNA (sncRNA) 5' YRNA-derived fragment
ctggtccgaaggtagtgagttatgtcaa

SEQ ID NO: 28051 - DNA, 31 bp, Artificial Sequence
  synthetic circulating small noncoding RNA (sncRNA) 5' YRNA-derived fragment
agccagtcaaatttagcagtggggtgttgta

SEQ ID NO: 28052 - DNA, 28 bp, Artificial Sequence
  synthetic circulating small noncoding RNA (sncRNA) 5' YRNA-derived fragment
gggtggtccaatggtagtgggttatcag

SEQ ID NO: 28053 - DNA, 27 bp, Artificial Sequence
  synthetic circulating small noncoding RNA (sncRNA) 5' YRNA-derived fragment
atttctgataacccactaccatcggac

SEQ ID NO: 28054 - DNA, 24 bp, Artificial Sequence
  synthetic circulating small noncoding RNA (sncRNA) 5' YRNA-derived fragment
ccgatggtagtgggttaccagaac

SEQ ID NO: 28055 - DNA, 21 bp, Artificial Sequence
  synthetic circulating small noncoding RNA (sncRNA) 5' YRNA-derived fragment
aagccagtcaaatttagcagc

SEQ ID NO: 28056 - DNA, 22 bp, Artificial Sequence
  synthetic circulating small noncoding RNA (sncRNA) 5' YRNA-derived fragment
tccccactgctaaatttgacta

SEQ ID NO: 28057 - DNA, 31 bp, Artificial Sequence
  synthetic circulating small noncoding RNA (sncRNA) 5' YRNA-derived fragment
gttctgatgagccactaccattggaccagcc

SEQ ID NO: 28058 - DNA, 36 bp, Artificial Sequence
  synthetic circulating small noncoding RNA (sncRNA) 5' YRNA-derived fragment
tctccactcccactgcttcacttgactagccttttg

SEQ ID NO: 28059 - DNA, 30 bp, Artificial Sequence
  synthetic circulating small noncoding RNA (sncRNA) 5' YRNA-derived fragment
attgagataactcactacctttggaccaga

SEQ ID NO: 28060 - DNA, 31 bp, Artificial Sequence
  synthetic circulating small noncoding RNA (sncRNA) 5' YRNA-derived fragment
ggctggccagagtgcagtggtgtttacaact

SEQ ID NO: 28061 - DNA, 21 bp, Artificial Sequence
  synthetic circulating small noncoding RNA (sncRNA) 5' YRNA-derived fragment
agtaaagtgcagtagtgagaa

SEQ ID NO: 28062 - DNA, 31 bp, Artificial Sequence
  synthetic circulating small noncoding RNA (sncRNA) 5' YRNA-derived fragment
gttctgataacctactacaatggaaccagcc

SEQ ID NO: 28063 - DNA, 20 bp, Artificial Sequence
  synthetic circulating small noncoding RNA (sncRNA) 5' YRNA-derived fragment
cccccactgctaaatttggc

SEQ ID NO: 28064 - DNA, 18 bp, Artificial Sequence
  synthetic circulating small noncoding RNA (sncRNA) 5' YRNA-derived fragment
aagccattcaaatttagc

SEQ ID NO: 28065 - DNA, 31 bp, Artificial Sequence
  synthetic circulating small noncoding RNA (sncRNA) 5' YRNA-derived fragment
agccagccaaatttcgcagtggggggttgta

SEQ ID NO: 28066 - DNA, 27 bp, Artificial Sequence
  synthetic circulating small noncoding RNA (sncRNA) 5' YRNA-derived fragment
ggtccaatgatagtgggttatcagaac

SEQ ID NO: 28067 - DNA, 25 bp, Artificial Sequence
  synthetic circulating small noncoding RNA (sncRNA) 5' YRNA-derived fragment
atagttacagatggaactccttgtt

SEQ ID NO: 28068 - DNA, 32 bp, Artificial Sequence
  synthetic circulating small noncoding RNA (sncRNA) 5' YRNA-derived fragment
aggctagtcaagtgaagcagtgggagttgaga

SEQ ID NO: 28069 - DNA, 30 bp, Artificial Sequence
  synthetic circulating small noncoding RNA (sncRNA) 5' YRNA-derived fragment
ttctgataacccactaccattggaccagcc

SEQ ID NO: 28070 - DNA, 35 bp, Artificial Sequence
  synthetic circulating small noncoding RNA (sncRNA) 5' YRNA-derived fragment
atcaattgagataacccactaccttcggacgagcc

SEQ ID NO: 28071 - DNA, 26 bp, Artificial Sequence
  synthetic circulating small noncoding RNA (sncRNA) 5' YRNA-derived fragment
gttctcactactgcacttgactagtc

SEQ ID NO: 28072 - DNA, 43 bp, Artificial Sequence
  synthetic circulating small noncoding RNA (sncRNA) 5' YRNA-derived fragment
ggctggtcagatggtagtgggttatcagaacttattaacattg

SEQ ID NO: 28073 - DNA, 21 bp, Artificial Sequence
  synthetic circulating small noncoding RNA (sncRNA) 5' YRNA-derived fragment
gtccgatggtagtgggttatc

SEQ ID NO: 28074 - DNA, 18 bp, Artificial Sequence
  synthetic circulating small noncoding RNA (sncRNA) 5' YRNA-derived fragment
gaagtgggttatcagaac

SEQ ID NO: 28075 - DNA, 24 bp, Artificial Sequence
  synthetic circulating small noncoding RNA (sncRNA) 5' YRNA-derived fragment
atttctgataacccactaccatcg

SEQ ID NO: 28076 - DNA, 27 bp, Artificial Sequence
  synthetic circulating small noncoding RNA (sncRNA) 5' YRNA-derived fragment
agcctagtcaagtgcagtagtgagaag

SEQ ID NO: 28077 - DNA, 29 bp, Artificial Sequence
  synthetic circulating small noncoding RNA (sncRNA) 5' YRNA-derived fragment
gctgctccaaaggtagtgagttatctcaa

SEQ ID NO: 28078 - DNA, 32 bp, Artificial Sequence
  synthetic circulating small noncoding RNA (sncRNA) 5' YRNA-derived fragment
taagccattcaaatttagcagtggggggttgt

SEQ ID NO: 28079 - DNA, 19 bp, Artificial Sequence
  synthetic circulating small noncoding RNA (sncRNA) 5' YRNA-derived fragment
agtcagttacagatcgaac

SEQ ID NO: 28080 - DNA, 22 bp, Artificial Sequence
  synthetic circulating small noncoding RNA (sncRNA) 5' YRNA-derived fragment
actggttgtgatcaattagttg

SEQ ID NO: 28081 - DNA, 25 bp, Artificial Sequence
  synthetic circulating small noncoding RNA (sncRNA) 5' YRNA-derived fragment
gctagtcaagtgcagtagtgagaag

SEQ ID NO: 28082 - DNA, 46 bp, Artificial Sequence
  synthetic circulating small noncoding RNA (sncRNA) 5' YRNA-derived fragment
taattgatcacaaccagttacagatttctttgttccttctccactc

SEQ ID NO: 28083 - DNA, 41 bp, Artificial Sequence
  synthetic circulating small noncoding RNA (sncRNA) 5' YRNA-derived fragment
aacattagtgtcactaaagttggtatacaaccccccactgc

SEQ ID NO: 28084 - DNA, 34 bp, Artificial Sequence
  synthetic circulating small noncoding RNA (sncRNA) 5' YRNA-derived fragment
ttctccactcccactacttcacttgactagcctt

SEQ ID NO: 28085 - DNA, 22 bp, Artificial Sequence
  synthetic circulating small noncoding RNA (sncRNA) 5' YRNA-derived fragment
ctagtcaagggaagcagtggga

SEQ ID NO: 28086 - DNA, 37 bp, Artificial Sequence
  synthetic circulating small noncoding RNA (sncRNA) 5' YRNA-derived fragment
gctggtccgatggtagtgggttatcagaacttattaa

SEQ ID NO: 28087 - DNA, 32 bp, Artificial Sequence
  synthetic circulating small noncoding RNA (sncRNA) 5' YRNA-derived fragment
taccacctcccactgctaaatttgactggctt

SEQ ID NO: 28088 - DNA, 18 bp, Artificial Sequence
  synthetic circulating small noncoding RNA (sncRNA) 5' YRNA-derived fragment
agttctgataacctgcta

SEQ ID NO: 28089 - DNA, 26 bp, Artificial Sequence
  synthetic circulating small noncoding RNA (sncRNA) 5' YRNA-derived fragment
ccccactgctaaatttgactggctta

SEQ ID NO: 28090 - DNA, 25 bp, Artificial Sequence
  synthetic circulating small noncoding RNA (sncRNA) 5' YRNA-derived fragment
ataaaccactgcactcggaccagcc

SEQ ID NO: 28091 - DNA, 32 bp, Artificial Sequence
  synthetic circulating small noncoding RNA (sncRNA) 5' YRNA-derived fragment
aggctagtcaagtgacgcagtggaagtggaga

SEQ ID NO: 28092 - DNA, 20 bp, Artificial Sequence
  synthetic circulating small noncoding RNA (sncRNA) 5' YRNA-derived fragment
cggctgcttcgagtgcagtg

SEQ ID NO: 28093 - DNA, 25 bp, Artificial Sequence
  synthetic circulating small noncoding RNA (sncRNA) 5' YRNA-derived fragment
aagctagtcaagtgaagcagtggga

SEQ ID NO: 28094 - DNA, 39 bp, Artificial Sequence
  synthetic circulating small noncoding RNA (sncRNA) 5' YRNA-derived fragment
actttagtgacactaatgttaataagttctgataaccca

SEQ ID NO: 28095 - DNA, 32 bp, Artificial Sequence
  synthetic circulating small noncoding RNA (sncRNA) 5' YRNA-derived fragment
aagttctgataacccactactatcggaccagc

SEQ ID NO: 28096 - DNA, 31 bp, Artificial Sequence
  synthetic circulating small noncoding RNA (sncRNA) 5' YRNA-derived fragment
ttttaagccagtaaaatttagcagtggggag

SEQ ID NO: 28097 - DNA, 19 bp, Artificial Sequence
  synthetic circulating small noncoding RNA (sncRNA) 5' YRNA-derived fragment
agccagccaaatttcgcag

SEQ ID NO: 28098 - DNA, 23 bp, Artificial Sequence
  synthetic circulating small noncoding RNA (sncRNA) 5' YRNA-derived fragment
aactaactaccttcagaccagcc

SEQ ID NO: 28099 - DNA, 34 bp, Artificial Sequence
  synthetic circulating small noncoding RNA (sncRNA) 5' YRNA-derived fragment
ttgattgagataactcactacctttggaccagcc

SEQ ID NO: 28100 - DNA, 19 bp, Artificial Sequence
  synthetic circulating small noncoding RNA (sncRNA) 5' YRNA-derived fragment
ttgtgggttattgttaagc

SEQ ID NO: 28101 - DNA, 25 bp, Artificial Sequence
  synthetic circulating small noncoding RNA (sncRNA) 5' YRNA-derived fragment
aggctagtcaagtgaagcagtgaga

SEQ ID NO: 28102 - DNA, 39 bp, Artificial Sequence
  synthetic circulating small noncoding RNA (sncRNA) 5' YRNA-derived fragment
ggctagtcaagtgaagcagtgggagtggagaagaaacaa

SEQ ID NO: 28103 - DNA, 22 bp, Artificial Sequence
  synthetic circulating small noncoding RNA (sncRNA) 5' YRNA-derived fragment
aaccactgcactcggaccagcc

SEQ ID NO: 28104 - DNA, 30 bp, Artificial Sequence
  synthetic circulating small noncoding RNA (sncRNA) 5' YRNA-derived fragment
ggctggtctgaagatagtaagttatctcaa

SEQ ID NO: 28105 - DNA, 38 bp, Artificial Sequence
  synthetic circulating small noncoding RNA (sncRNA) 5' YRNA-derived fragment
gtgaagcagtgggagtggagaaggaacaaagaaatctg

SEQ ID NO: 28106 - DNA, 20 bp, Artificial Sequence
  synthetic circulating small noncoding RNA (sncRNA) 5' YRNA-derived fragment
actgcttcacttgactagaa

SEQ ID NO: 28107 - DNA, 27 bp, Artificial Sequence
  synthetic circulating small noncoding RNA (sncRNA) 5' YRNA-derived fragment
atataactcactaccttcggaccagcc

SEQ ID NO: 28108 - DNA, 46 bp, Artificial Sequence
  synthetic circulating small noncoding RNA (sncRNA) 5' YRNA-derived fragment
tgtctttgttccttctccactcccactgcttcacctgactagcctt

SEQ ID NO: 28109 - DNA, 31 bp, Artificial Sequence
  synthetic circulating small noncoding RNA (sncRNA) 5' YRNA-derived fragment
caacccccaactgctaaatttgactggcttt

SEQ ID NO: 28110 - DNA, 30 bp, Artificial Sequence
  synthetic circulating small noncoding RNA (sncRNA) 5' YRNA-derived fragment
ggctagtctgatggtagtgggttatcagaa

SEQ ID NO: 28111 - DNA, 29 bp, Artificial Sequence
  synthetic circulating small noncoding RNA (sncRNA) 5' YRNA-derived fragment
taagccagtcaaatttagcagtggagggt

SEQ ID NO: 28112 - DNA, 27 bp, Artificial Sequence
  synthetic circulating small noncoding RNA (sncRNA) 5' YRNA-derived fragment
gtccgagtgttgtgggttattgttaag

SEQ ID NO: 28113 - DNA, 29 bp, Artificial Sequence
  synthetic circulating small noncoding RNA (sncRNA) 5' YRNA-derived fragment
ccactcccgctgcttcacttgactagcct

SEQ ID NO: 28114 - DNA, 22 bp, Artificial Sequence
  synthetic circulating small noncoding RNA (sncRNA) 5' YRNA-derived fragment
ctctgcttcacttgactagcct

SEQ ID NO: 28115 - DNA, 31 bp, Artificial Sequence
  synthetic circulating small noncoding RNA (sncRNA) 5' YRNA-derived fragment
taagttctgataacccactaccatccgacaa

SEQ ID NO: 28116 - DNA, 24 bp, Artificial Sequence
  synthetic circulating small noncoding RNA (sncRNA) 5' YRNA-derived fragment
cttctcactactgcacttgagtag

SEQ ID NO: 28117 - DNA, 34 bp, Artificial Sequence
  synthetic circulating small noncoding RNA (sncRNA) 5' YRNA-derived fragment
atttagcagtggggggttgtataccaactttaat

SEQ ID NO: 28118 - DNA, 30 bp, Artificial Sequence
  synthetic circulating small noncoding RNA (sncRNA) 5' YRNA-derived fragment
ggctagtccgaaggtagagagttatctcag

SEQ ID NO: 28119 - DNA, 22 bp, Artificial Sequence
  synthetic circulating small noncoding RNA (sncRNA) 5' YRNA-derived fragment
tagtcaagtgcagtagtgagaa

SEQ ID NO: 28120 - DNA, 26 bp, Artificial Sequence
  synthetic circulating small noncoding RNA (sncRNA) 5' YRNA-derived fragment
ttcagtcaaatttagcagtggggggt

SEQ ID NO: 28121 - DNA, 28 bp, Artificial Sequence
  synthetic circulating small noncoding RNA (sncRNA) 5' YRNA-derived fragment
ctggtcagatggtagtgggttatcagaa

SEQ ID NO: 28122 - DNA, 24 bp, Artificial Sequence
  synthetic circulating small noncoding RNA (sncRNA) 5' YRNA-derived fragment
atgttttgataacccactaccatc

SEQ ID NO: 28123 - DNA, 25 bp, Artificial Sequence
  synthetic circulating small noncoding RNA (sncRNA) 5' YRNA-derived fragment
ttgattgttcacagtcagttacaga

SEQ ID NO: 28124 - DNA, 19 bp, Artificial Sequence
  synthetic circulating small noncoding RNA (sncRNA) 5' YRNA-derived fragment
tagtgggttatcagaacac

SEQ ID NO: 28125 - DNA, 25 bp, Artificial Sequence
  synthetic circulating small noncoding RNA (sncRNA) 5' YRNA-derived fragment
agctagtcaagcgtggttgtggggg

SEQ ID NO: 28126 - DNA, 32 bp, Artificial Sequence
  synthetic circulating small noncoding RNA (sncRNA) 5' YRNA-derived fragment
ggctagtcaagtgaagcagtgggagtagagaa

SEQ ID NO: 28127 - DNA, 22 bp, Artificial Sequence
  synthetic circulating small noncoding RNA (sncRNA) 5' YRNA-derived fragment
cttctcactgctgcacttgact

SEQ ID NO: 28128 - DNA, 32 bp, Artificial Sequence
  synthetic circulating small noncoding RNA (sncRNA) 5' YRNA-derived fragment
aatcgatataactcactaccttcggaccagcc

SEQ ID NO: 28129 - DNA, 24 bp, Artificial Sequence
  synthetic circulating small noncoding RNA (sncRNA) 5' YRNA-derived fragment
cagtcaaatttagcagtgggggat

SEQ ID NO: 28130 - DNA, 28 bp, Artificial Sequence
  synthetic circulating small noncoding RNA (sncRNA) 5' YRNA-derived fragment
taagccagtcaaatttatcagagggggg

SEQ ID NO: 28131 - DNA, 32 bp, Artificial Sequence
  synthetic circulating small noncoding RNA (sncRNA) 5' YRNA-derived fragment
tttccccccttctcactactgcacttgactag

SEQ ID NO: 28132 - DNA, 32 bp, Artificial Sequence
  synthetic circulating small noncoding RNA (sncRNA) 5' YRNA-derived fragment
ctagtcaagtgaagcagtgggagtggagaagg

SEQ ID NO: 28133 - DNA, 27 bp, Artificial Sequence
  synthetic circulating small noncoding RNA (sncRNA) 5' YRNA-derived fragment
agttctgataacccaccaccatggaca

SEQ ID NO: 28134 - DNA, 24 bp, Artificial Sequence
  synthetic circulating small noncoding RNA (sncRNA) 5' YRNA-derived fragment
ccactacttcacttgactagcctt

SEQ ID NO: 28135 - DNA, 28 bp, Artificial Sequence
  synthetic circulating small noncoding RNA (sncRNA) 5' YRNA-derived fragment
ttaagccagtaaaatttagcagtgggga

SEQ ID NO: 28136 - DNA, 35 bp, Artificial Sequence
  synthetic circulating small noncoding RNA (sncRNA) 5' YRNA-derived fragment
ctggtccgatggtagtgggttatcagaacttatta

SEQ ID NO: 28137 - DNA, 18 bp, Artificial Sequence
  synthetic circulating small noncoding RNA (sncRNA) 5' YRNA-derived fragment
cttctcgactcccactgc

SEQ ID NO: 28138 - DNA, 24 bp, Artificial Sequence
  synthetic circulating small noncoding RNA (sncRNA) 5' YRNA-derived fragment
acattagtgtcactaaagttggta

SEQ ID NO: 28139 - DNA, 28 bp, Artificial Sequence
  synthetic circulating small noncoding RNA (sncRNA) 5' YRNA-derived fragment
taatccagtgaaatttagcaatgggggg

SEQ ID NO: 28140 - DNA, 20 bp, Artificial Sequence
  synthetic circulating small noncoding RNA (sncRNA) 5' YRNA-derived fragment
tacagatcgaactccttgtt

SEQ ID NO: 28141 - DNA, 27 bp, Artificial Sequence
  synthetic circulating small noncoding RNA (sncRNA) 5' YRNA-derived fragment
cattcccactgcttcacttgactagtt

SEQ ID NO: 28142 - DNA, 30 bp, Artificial Sequence
  synthetic circulating small noncoding RNA (sncRNA) 5' YRNA-derived fragment
ctgagataactcacgaccttcacaccagcc

SEQ ID NO: 28143 - DNA, 34 bp, Artificial Sequence
  synthetic circulating small noncoding RNA (sncRNA) 5' YRNA-derived fragment
aaggctagtcaagtgaagcagtgggagtggaaaa

SEQ ID NO: 28144 - DNA, 25 bp, Artificial Sequence
  synthetic circulating small noncoding RNA (sncRNA) 5' YRNA-derived fragment
gttctgataacccactaccatcgaa

SEQ ID NO: 28145 - DNA, 23 bp, Artificial Sequence
  synthetic circulating small noncoding RNA (sncRNA) 5' YRNA-derived fragment
cagtcaaatttagcagtaggggg

SEQ ID NO: 28146 - DNA, 22 bp, Artificial Sequence
  synthetic circulating small noncoding RNA (sncRNA) 5' YRNA-derived fragment
tcccagtgcttcacttgactag

SEQ ID NO: 28147 - DNA, 44 bp, Artificial Sequence
  synthetic circulating small noncoding RNA (sncRNA) 5' YRNA-derived fragment
ctctttgttccttctccactcccactgcttcacttgactagcct

SEQ ID NO: 28148 - DNA, 21 bp, Artificial Sequence
  synthetic circulating small noncoding RNA (sncRNA) 5' YRNA-derived fragment
actgctatatttgactggcta

SEQ ID NO: 28149 - DNA, 38 bp, Artificial Sequence
  synthetic circulating small noncoding RNA (sncRNA) 5' YRNA-derived fragment
ggtccgatggtagtgggttatcagaacttattaacatt

SEQ ID NO: 28150 - DNA, 28 bp, Artificial Sequence
  synthetic circulating small noncoding RNA (sncRNA) 5' YRNA-derived fragment
agttctgataacccactaccattgggcc

SEQ ID NO: 28151 - DNA, 30 bp, Artificial Sequence
  synthetic circulating small noncoding RNA (sncRNA) 5' YRNA-derived fragment
ttgagataactcactacctttggaccaacc

SEQ ID NO: 28152 - DNA, 24 bp, Artificial Sequence
  synthetic circulating small noncoding RNA (sncRNA) 5' YRNA-derived fragment
actagtgtcactaaagttggtata

SEQ ID NO: 28153 - DNA, 18 bp, Artificial Sequence
  synthetic circulating small noncoding RNA (sncRNA) 5' YRNA-derived fragment
aggaacaaagaaatctgt

SEQ ID NO: 28154 - DNA, 42 bp, Artificial Sequence
  synthetic circulating small noncoding RNA (sncRNA) 5' YRNA-derived fragment
ggctagtcaagtgaagcagtgggagtggagaaggaacaaaga

SEQ ID NO: 28155 - DNA, 38 bp, Artificial Sequence
  synthetic circulating small noncoding RNA (sncRNA) 5' YRNA-derived fragment
ggctggtctgaaggtagtgagttatctcaattgattgt

SEQ ID NO: 28156 - DNA, 34 bp, Artificial Sequence
  synthetic circulating small noncoding RNA (sncRNA) 5' YRNA-derived fragment
agctggttcgatggcagtgggttatcagaactta

SEQ ID NO: 28157 - DNA, 30 bp, Artificial Sequence
  synthetic circulating small noncoding RNA (sncRNA) 5' YRNA-derived fragment
gctggtctgatggtagtgggttatcagaat

SEQ ID NO: 28158 - DNA, 27 bp, Artificial Sequence
  synthetic circulating small noncoding RNA (sncRNA) 5' YRNA-derived fragment
taagccagtcaaatttagcagtgaggg

SEQ ID NO: 28159 - DNA, 31 bp, Artificial Sequence
  synthetic circulating small noncoding RNA (sncRNA) 5' YRNA-derived fragment
aaagccagtcaaatttagcagtggggggcta

SEQ ID NO: 28160 - DNA, 33 bp, Artificial Sequence
  synthetic circulating small noncoding RNA (sncRNA) 5' YRNA-derived fragment
taaggctagtcaagtgaagcagtgggagtggag

SEQ ID NO: 28161 - DNA, 32 bp, Artificial Sequence
  synthetic circulating small noncoding RNA (sncRNA) 5' YRNA-derived fragment
tactgagataactcactacctttggacaagcc

SEQ ID NO: 28162 - DNA, 18 bp, Artificial Sequence
  synthetic circulating small noncoding RNA (sncRNA) 5' YRNA-derived fragment
actaccttcggaacaccc

SEQ ID NO: 28163 - DNA, 25 bp, Artificial Sequence
  synthetic circulating small noncoding RNA (sncRNA) 5' YRNA-derived fragment
gtataccaactttagtgacactaat

SEQ ID NO: 28164 - DNA, 22 bp, Artificial Sequence
  synthetic circulating small noncoding RNA (sncRNA) 5' YRNA-derived fragment
ccactgcttcacttgactagcc

SEQ ID NO: 28165 - DNA, 31 bp, Artificial Sequence
  synthetic circulating small noncoding RNA (sncRNA) 5' YRNA-derived fragment
ggctggtccgaaggtggtgagttacctcaga

SEQ ID NO: 28166 - DNA, 37 bp, Artificial Sequence
  synthetic circulating small noncoding RNA (sncRNA) 5' YRNA-derived fragment
cagtcaaatttagcagtggggggttgtataccaactt

SEQ ID NO: 28167 - DNA, 23 bp, Artificial Sequence
  synthetic circulating small noncoding RNA (sncRNA) 5' YRNA-derived fragment
gttaataagttctgataacccac

SEQ ID NO: 28168 - DNA, 38 bp, Artificial Sequence
  synthetic circulating small noncoding RNA (sncRNA) 5' YRNA-derived fragment
agtgacactaatgttaataagttctgataacccactac

SEQ ID NO: 28169 - DNA, 34 bp, Artificial Sequence
  synthetic circulating small noncoding RNA (sncRNA) 5' YRNA-derived fragment
ttctttactcccactgcttcacttgactagcctt

SEQ ID NO: 28170 - DNA, 23 bp, Artificial Sequence
  synthetic circulating small noncoding RNA (sncRNA) 5' YRNA-derived fragment
aacccattaccatcggagcagcc

SEQ ID NO: 28171 - DNA, 30 bp, Artificial Sequence
  synthetic circulating small noncoding RNA (sncRNA) 5' YRNA-derived fragment
gtgatataactcactacctttggaccagcc

SEQ ID NO: 28172 - DNA, 32 bp, Artificial Sequence
  synthetic circulating small noncoding RNA (sncRNA) 5' YRNA-derived fragment
agttcaatctgtaacggactgtgaacaatcaa

SEQ ID NO: 28173 - DNA, 33 bp, Artificial Sequence
  synthetic circulating small noncoding RNA (sncRNA) 5' YRNA-derived fragment
atcagaacttattaacattagtgtcactaaagt

SEQ ID NO: 28174 - DNA, 22 bp, Artificial Sequence
  synthetic circulating small noncoding RNA (sncRNA) 5' YRNA-derived fragment
acaaccgcgcttgactagcttg

SEQ ID NO: 28175 - DNA, 18 bp, Artificial Sequence
  synthetic circulating small noncoding RNA (sncRNA) 5' YRNA-derived fragment
aaatttagcagtgtgggg

SEQ ID NO: 28176 - DNA, 45 bp, Artificial Sequence
  synthetic circulating small noncoding RNA (sncRNA) 5' YRNA-derived fragment
gagtggagaaggaacaaagaaatctgtaactggttatgatcaatg

SEQ ID NO: 28177 - DNA, 32 bp, Artificial Sequence
  synthetic circulating small noncoding RNA (sncRNA) 5' YRNA-derived fragment
tctccattcccacttcttcacttgactagcct

SEQ ID NO: 28178 - DNA, 40 bp, Artificial Sequence
  synthetic circulating small noncoding RNA (sncRNA) 5' YRNA-derived fragment
ttatcagaacttattaacattagtgtcactaaagttggta

SEQ ID NO: 28179 - DNA, 31 bp, Artificial Sequence
  synthetic circulating small noncoding RNA (sncRNA) 5' YRNA-derived fragment
agccagtcaaatttagcagtgggggattgtc

SEQ ID NO: 28180 - DNA, 32 bp, Artificial Sequence
  synthetic circulating small noncoding RNA (sncRNA) 5' YRNA-derived fragment
agtgggagtggagaaggaacaaagaaatctgt

SEQ ID NO: 28181 - DNA, 33 bp, Artificial Sequence
  synthetic circulating small noncoding RNA (sncRNA) 5' YRNA-derived fragment
aggctggtcctatggtagtgggttatcagaact

SEQ ID NO: 28182 - DNA, 25 bp, Artificial Sequence
  synthetic circulating small noncoding RNA (sncRNA) 5' YRNA-derived fragment
cccccactccttcacttgactagcc

SEQ ID NO: 28183 - DNA, 46 bp, Artificial Sequence
  synthetic circulating small noncoding RNA (sncRNA) 5' YRNA-derived fragment
cactaaagttggtacacaacccccaactgctaaatttgactggctt

SEQ ID NO: 28184 - DNA, 24 bp, Artificial Sequence
  synthetic circulating small noncoding RNA (sncRNA) 5' YRNA-derived fragment
tgatggtagtgggttatcagaatt

SEQ ID NO: 28185 - DNA, 25 bp, Artificial Sequence
  synthetic circulating small noncoding RNA (sncRNA) 5' YRNA-derived fragment
aagccattcaaatttagcagtgggg

SEQ ID NO: 28186 - DNA, 40 bp, Artificial Sequence
  synthetic circulating small noncoding RNA (sncRNA) 5' YRNA-derived fragment
tgctagtctgatggtagtgggttatcagaacttattaaca

SEQ ID NO: 28187 - DNA, 19 bp, Artificial Sequence
  synthetic circulating small noncoding RNA (sncRNA) 5' YRNA-derived fragment
ctgcttcacttgactagtg

SEQ ID NO: 28188 - DNA, 32 bp, Artificial Sequence
  synthetic circulating small noncoding RNA (sncRNA) 5' YRNA-derived fragment
ccccccttctcactactacacttgactaatct

SEQ ID NO: 28189 - DNA, 30 bp, Artificial Sequence
  synthetic circulating small noncoding RNA (sncRNA) 5' YRNA-derived fragment
gctggtctgatggtagtgggttatcagagc

SEQ ID NO: 28190 - DNA, 40 bp, Artificial Sequence
  synthetic circulating small noncoding RNA (sncRNA) 5' YRNA-derived fragment
agttgttccttctccactcccactgcttcacttgactagc

SEQ ID NO: 28191 - DNA, 22 bp, Artificial Sequence
  synthetic circulating small noncoding RNA (sncRNA) 5' YRNA-derived fragment
acccactaccattggaccagcc

SEQ ID NO: 28192 - DNA, 26 bp, Artificial Sequence
  synthetic circulating small noncoding RNA (sncRNA) 5' YRNA-derived fragment
ttctcgctactgcacttgactagtct

SEQ ID NO: 28193 - DNA, 28 bp, Artificial Sequence
  synthetic circulating small noncoding RNA (sncRNA) 5' YRNA-derived fragment
ggctggtccaaagggagtgagttatctc

SEQ ID NO: 28194 - DNA, 34 bp, Artificial Sequence
  synthetic circulating small noncoding RNA (sncRNA) 5' YRNA-derived fragment
ggctggtccgaatgtagtgagttatctcaattga

SEQ ID NO: 28195 - DNA, 43 bp, Artificial Sequence
  synthetic circulating small noncoding RNA (sncRNA) 5' YRNA-derived fragment
aagccattcaaatttagcagtggggggttgtatacgaacttta
